(19) United States
(12) Patent Application Publication
(10) Pub. No.: US 2022/0211063 A1
(43) Pub. Date: Jul. 7, 2022

(54) FUNGAL STRAINS, PRODUCTION AND USES THEREOF

(71) Applicant: UNIVERSITY OF NOTTINGHAM, Nottingham (GB)

(72) Inventor: Paul DYER, Nottingham (GB)

(73) Assignee: UNIVERSITY OF NOTTINGHAM, Nottingham (GB)

(21) Appl. No.: 17/604,485

(22) PCT Filed: Apr. 16, 2020
(86) PCT No.: PCT/EP2020/060793

§ 371 Date: Oct. 18, 2021

(30) Foreign Application Priority Data
Apr. 16, 2019 (GB) 1905360.2

(51) Int. Cl. A23C 19/032; C12N 3/00; C12N 1/14; A23C 19/068; G01N 30/72

(52) U.S. Cl. CPC A23C 19/032; C12N 3/00; C12N 1/14; C12R 2001/80; A23C 19/0682; G01N 30/7206; C12N 1/145

(57) ABSTRACT

This invention relates to novel Penicillium strains, the production of novel Penicillium strains, and the use of novel Penicillium strains in various end applications.

### TECHNICAL FIELD

[0001] This invention relates to novel Penicillium strains, the production of novel Penicillium strains, and the use of novel Penicillium strains in various applications.

### BACKGROUND

[0002] Penicillium species are generally ubiquitous, opportunistic saprophytic fungi, being found on a variety of decaying organic matter. They have been isolated from various substrates and environments including air, soil, various food and feed products and indoor environments. They include species that are vitally important in the medical, biotechnological and food industries.

[0003] The name Penicillium is derived from Latin (penicillus: paintbrush) and was first described in 1809. Species in this genus are characterised by the production of an asexual reproductive structure known as a penicillus. Most of the species in this genus produce green or blue-green colonies of branched, septate conidiophores, with sporulating cells (phialides or sterigmata) clustered at the ends on which the conidia are located; this structure is known as a penicillus. Most Penicillium species produce conidia of similar colour.

[0004] A number of strains of Penicillium species are used in the production of mould-ripened cheese worldwide, for example P. roqueforti and P. camemberti are used in the production of Roquefort and Camembert cheeses, respectively. Blue cheeses, such as Roquefort, are by definition cheeses that are ripened primarily by the growth and activity of appropriate strains of P. roqueforti throughout the cheese mass rather than on the surface only. Whereas in other cheeses, such as Camembert, the fungal growth, in this case P. camemberti, is on the cheese surface.

[0005] Until recently, the majority of Penicillium species were only known as asexual organisms, meaning that it was very difficult to generate novel genetic diversity to make different strains. As a result, relatively few strains were available for cheese production and other applications. Strain improvement therefore mainly relies on random mutagenesis, followed by screening for variants exhibiting enhanced properties of interest such as growth, mycelium thickness and colony colour or lipolytic and proteolytic actions.

[0006] As described herein, an improved method for making sexual crosses of Penicillium species, and Penicillium roqueforti in particular, means that new strains with new properties, including new flavours, can be more readily made. Other desirable properties can also be selected for in the sexual crosses, including commercial traits such as faster growth and increased shelf life.

[0007] Creating genetic variation through sexual crossing furthermore enables the targeted development of novel strains that provide a benefit to the product manufacturer and/or the consumer in terms of quality and sensorial factors.

### SUMMARY OF THE INVENTION

[0008] The inventors have developed an improved method for sexually reproducing Penicillium. The improved method improves the chance of mating, which in turn makes the method for production more economically efficient than conventional methods for Penicillium strain production.

[0009] The inventors have also developed novel strains of Penicillium and novel Penicillium derivatives having changed spore colour. The inventors have also isolated and characterised novel strains of Penicillium from silage located in the West Midlands, England, United Kingdom.

[0010] A first aspect of the present invention provides novel strains of Penicillium selected from:
[0011] (a) strain Penicillium roqueforti 5A (74-256) deposited under the Budapest Treaty with accession no. CBS 145358, referred to herein as “5A”;
[0012] (b) strain Penicillium roqueforti 12A (74-257) deposited under the Budapest Treaty with accession no. CBS 145359, referred to herein as “12A”;
[0013] (c) strain Penicillium roqueforti A22 (74-160) deposited under the Budapest Treaty with accession no. CBS 145360, referred to herein as “A22”;
[0014] (d) strain Penicillium roqueforti B20 (74-170) deposited under the Budapest Treaty with accession no. CBS 145361, referred to herein as “B20”;
[0015] (e) a strain obtainable by sexually crossing strains of Penicillium roqueforti 74-130 and 74-144 and having similar characteristics to A22;
[0016] (f) a strain obtainable by sexually crossing strains of Penicillium roqueforti 74-133 and 74-146 and having similar characteristics to B20;
[0017] (g) variant strains having at least 99.0% sequence identity to the genome sequence of any of the strains defined in (a) to (f).

[0018] Strains 5A (CBS 145358), 12A (CBS 145359), A22 (CBS 145360) and B20 (CBS 145361) were deposited under the Budapest Treaty at the Westerdijk Fungal Biodiversity Institute (an International Depositary Authority registered under the Budapest Treaty), Utrecht, The Netherlands, on 24 Jan. 2019. The deposit was made by Dr Paul S. Dyer of the University of Nottingham, School of Life Sciences, University Park, Nottingham NG7 2RD, United Kingdom.

[0019] Penicillium roqueforti strains 74-130, 74-144, 74-133, 74-146 may be found at the Nottingham University BDUN Collection.

[0020] The novel strains exhibit certain characteristics which differ from one or both parental strains used in the sexual cross, or relative to known strains used in the manufacture of dairy products. A person skilled in the art would readily be aware of the known and commercially-available Penicillium strains typically used in the manufacture of dairy products.

[0021] For example, the novel strains may exhibit altered protease and/or lipase levels and/or activity. Additionally or alternatively, the novel strains may have altered levels of certain secondary metabolites. Additionally or alternatively, when used in the production of dairy products, the novel strains may alter the organoleptic profile of the dairy product. In each case, the altered characteristic is altered either compared to one or both parental strains used in the sexual cross, or relative to known strains used in the manufacture of dairy products.

[0022] The parental strains used in a sexual cross may be any known strain of Penicillium, optionally any known strain of Penicillium roqueforti. In one embodiment, the parental strain may be selected from at least one of: Penicillium roqueforti 74-130, 74-144, 74-133, 74-146, 74-88, 74-92. The aforementioned numbers refer to strains which may be found at the Nottingham University BDUN Collection.

[0023] Strain A22 may be derived from a cross of parental strains of Penicillium roqueforti 74-130 and 74-144. Strain B20 may be derived from a cross of parental strains Penicillium roqueforti 74-133 and 74-146.

[0024] In order to generate further novel strains, any known Penicillium strain may be crossed with one of the novel strains described under any of (a) to (g) above, such as strains 5A, 12A, A22, B20 and variants thereof. Optionally, the novel strains listed under (a) to (g) above may be crossed with each other.

[0025] Reference herein to an “organoleptic profile” refers to sensory features of the dairy product in question, particularly cheese, such as the appearance, smell, flavour, texture, mouthfeel or any such attribute which contributes to eating quality.

[0026] The organoleptic profile may, for example, be a flavour profile. The flavour profile conferred by the Penicillium strains to any given food product may be determined using any known method. For example, methods such as principal component analysis of flavour volatiles (such as methyl ketones, alcohols etc.) produced on, for example, milk media as detected by GC-MS methodology, may be used to determine a flavour profile (see FIG. 10 for one such example).

[0027] According to one embodiment, the invention provides Penicillium strains having a flavour profile that is substantially similar to the flavour profile of strains 5A, 12A, A22, B20, for example as shown in FIG. 10. Whether a strain has a “substantially similar” flavour profile may readily be determined by a skilled person using any suitable technique, such as GC-MS. A strain having a substantially similar flavour profile to any of strains 5A, 12A, A22, B20 may also share other similarities, such as enzyme activity and levels and/or levels of certain secondary metabolites.

[0028] The altered levels of any given mycotoxin (such as such as mycophenolic acid, Roquefortines (A, B and C), PR toxin and Penillic acid) found in the novel strains of the invention may be lower or higher compared to levels of the corresponding mycotoxin produced by known strains of Penicillium roqueforti, such as known strains used in cheese production. Strains with altered levels of mycotoxin production relative to current production strains may be beneficial for cheese production, with some mycotoxins even having health promoting benefits, making increased levels of certain mycotoxins beneficial. The presence and levels of mycotoxins may be detected and measured using any known technique, such as liquid chromatographic techniques (e.g. HPLC).

[0029] Variants of strains 5A, 12A, A22 and B20 include strains having at least 99.0%, 99.1%, 99.2%, 99.3%, 99.4%, 99.5%, 99.6%, 99.7%, 99.8%, 99.9% or more sequence identity to the genomic DNA sequence of strains 5A, 12A, A22 and B20. The genomic sequence for the aforementioned strains may be represented by any of the SEQ ID NOs listed below or sequences having at least 99.0%, 99.1%, 99.2%, 99.3%, 99.4%, 99.5%, 99.6%, 99.7%, 99.8%, 99.9% or more sequence identity thereto.

[0030] Strain 5A: the supercontigs represented by SEQ ID NO: 7 to SEQ ID NO: 54 or sequences having at least 99.0% sequence identity to any one or more of the aforementioned SEQ ID NOs;

[0031] Strain 12A: the supercontigs represented by SEQ ID NO: 55 to SEQ ID NO: 102 or sequences having at least 99.0% sequence identity to any one or more of the aforementioned SEQ ID NOs;

[0032] A22: the supercontigs represented by SEQ ID NO: 103 to SEQ ID NO: 150 or sequences having at least 99.0% sequence identity to any one or more of the aforementioned SEQ ID NOs;

[0033] B20: the supercontigs represented by SEQ ID NO: 151 to SEQ ID NO: 198 or sequences having at least 99.0% sequence identity to any one or more of the aforementioned SEQ ID NOs.

[0034] A person skilled in the art would readily appreciate how to compile the sequence of a genome based on the contigs/supercontigs provided herein.

[0035] The at least 99.0% sequence identity may be with reference to the SEQ ID NOs mentioned above or to the genomic sequence of the strain as deposited under the Budapest Treaty at the Westerdijk Fungal Biodiversity Institute: CBS 145358 (5A), CBS 145359 (12A), CBS 145360 (A22) and CBS 145361 (B20).

[0036] Identity in this context may be determined using the TBLASTN computer program with the DNA genome sequence for strains 5A, 12A, A22, B20. The BLAST software is publicly available at http://blast.ncbi.nlm.nih.gov/Blast.cgi (accessible on 12 Mar. 2009). The variant strains suitably also exhibit the same or similar biological and functional characteristics as the unmodified strain from which they are derived or on which they are based. The variant strain may have a different or similar organoleptic, for example, flavour profile to strain 5A, 12A, A22 and B20. The variant strain may have similar or different activities or levels of various enzymes and/or levels of certain secondary metabolites.

[0037] The abovementioned characteristics listed under any one or more of (a) to (g) do not appear in analyses of other available Penicillium strains. Further differences between strains 5A, 12A, A22 and B20 are provided in the tables below, which differences are relative to a known reference genome, ‘FM164’ (see: https://funqi.ensembl.orq/Penicillium roqueforti fm164 qca 000513255/Info/Index and https://www.ebi.ac.uk/ena/data/view/GCA 000513255.1) and Cheeseman et al., 2014: Multiple recent horizontal transfers of a large genomic region in cheese making fungi (Nature Communications 5: 2876. DOI: 10.1038/ncomms3876). The differences not only distinguish the strains from the reference genome, but also from each other. Although not exhaustive, one or more of the differences shown in the tables below may be used as a diagnostic to help identify the strains of the invention.

TABLE A
Differences between reference genome and strain 5A

| Contig | Position | Ref | Alt | Type | Rank |
|---|---|---|---|---|---|
| HG792015.1 | 6999870 | C | CCAA | disruptive_inframe_insertion | MODERAIE |
| HG792015.1 | 6999882 | C | CCAA | disruptive_inframe_insertion | MODERATE |
| HG792016.1 | 109210 | G | A | missense_variant | MODERATE |
| HG792016.1 | 109283 | C | T | synonymous_variant | LOW |
| HG792016.1 | 109294 | C | T | missense_variant | MODERATE |
| HG792016.1 | 109295 | G | A | synonymous_variant | LOW |
| HG792016.1 | 109300 | G | A | missense_variant | MODERATE |
| HG792016.1 | 109302 | G | A | missense_variant | MODERATE |
| HG792016.1 | 109312 | TG | T | frameshift_variant | HIGH |
| HG792016.1 | 109316 | G | GGTAT | frameshift_variant | HIGH |
| HG792016.1 | 109318 | ACCG | A | stop_gained&disruptive_inframe_deletion | HIGH |
| HG792016.1 | 109324 | G | A | missense_variant | MODERATE |
| HG792016.1 | 109329 | G | A | missense_variant | MODERATE |
| HG792016.1 | 109336 | C | T | missense_variant | MODERATE |
| HG792016.1 | 109339 | C | T | missense_variant | MODERATE |
| HG792016.1 | 109343 | G | A | synonymous_variant | LOW |
| HG792016.1 | 109386 | C | T | missense_variant | MODERATE |
| HG792016.1 | 109387 | G | A | missense_variant | MODERATE |
| HG792016.1 | 109392 | C | T | stop_gained | HIGH |
| HG792016.1 | 109400 | G | A | synonymous_variant | LOW |
| HG792016.1 | 109401 | C | T | missense_variant | MODERATE |
| HG792016,1 | 109402 | C | T | missense_variant | MODERATE |
| HG792016.1 | 109411 | C | T | missense_variant | MODERATE |
| HG792016.1 | 109413 | C | T | stop_gained | HIGH |
| HG792016.1 | 109419 | G | A | missense_variant | MODERATE |
| HG792016.1 | 109424 | C | T | synonymous_variant | LOW |
| HG792016.1 | 109427 | C | T | synonymous_variant | LOW |
| HG792016.1 | 109434 | C | T | missense_variant | MODERATE |
| HG792016.1 | 109435 | G | A | missense_variant | MODERATE |
| HG792016.1 | 109448 | G | A | synonymous_variant | LOW |
| HG792016.1 | 109450 | C | T | missense_variant | MODERATE |
| HG792016.1 | 109459 | C | T | missense_variant | MODERATE |
| HG792016.1 | 109463 | G | A | synonymous_variant | LOW |
| HG792016.1 | 109474 | C | T | missense_variant | MODERATE |
| HG792016.1 | 109485 | C | T | stop_gained | HIGH |
| HG792016.1 | 109497 | C | T | missense_variant | MODERATE |
| HG792016.1 | 109501 | G | A | missense_variant | MODERATE |
| HG792019.1 | 1321186 | C | T | missense_variant | MODERATE |
| HG792019.1 | 1321586 | C | T | synonymous_variant | LOW |
| HG792019.1 | 1321866 | C | G | synonymous_variant | LOW |
| HG792019.1 | 1321897 | C | T | missense_variant | MODERATE |
| HG792019.1 | 1321961 | C | T | missense_variant | MODERATE |
| HG792019.1 | 1322146 | C | T | synonymous_variant | LOW |

| | | | RefCov, | |
|---|---|---|---|---|
| Contig | Gene | GeneID | AltCov | TotalCov |
| HG792015.1 | PROQFM164_S01g002951 | gene2947 | 11.33 | 44 |
| HG792015.1 | PROQFM164_S01g002951 | gene2947 | 16.37 | 53 |
| HG792016.1 | PROQFM164_S02g000051 | gene3710 | 0.0 | 0 |
| HG792016.1 | PROQFM164_S02g000051 | gene3710 | 0.29 | 29 |
| HG792016.1 | PROQFM164_S02g000051 | gene3710 | 0.29 | 29 |
| HG792016.1 | PROQFM164_S02g000051 | gene3710 | 0.29 | 29 |
| HG792016.1 | PROQFM164_S02g000051 | gene3710 | 0.28 | 28 |
| HG792016.1 | PROQFM164_S02g000051 | gene3710 | 0.28 | 28 |
| HG792016.1 | PRGQFM164_S02g000051 | gene3710 | 0.27 | 27 |
| HG792016.1 | PROQFM164_S02g000051 | gene3710 | 0.27 | 27 |
| HG792016.1 | PROQFM164_S02g000051 | gene3710 | 0.27 | 27 |
| HG792016.1 | PROQFM164_S02g000051 | gene3710 | 0.27 | 27 |
| HG792016.1 | PROQFM164_S02g000051 | gene3710 | 0.26 | 26 |
| HG792016.1 | PROQFM164_S02g000051 | gene3710 | 0.26 | 26 |
| HG792016.1 | PROQFM164_S02g000051 | gene3710 | 0.26 | 26 |
| HG792016.1 | PROQFM164_S02g000051 | gene3710 | 0.26 | 26 |
| HG792016.1 | PROQFM164_S02g000061 | gene3710 | 0.20 | 20 |
| HG792016.1 | PROQFM164_S02g000051 | gene3710 | 0.19 | 19 |
| HG792016.1 | PROQFM164_S02g000051 | gene3710 | 0.19 | 19 |
| HG792016.1 | PROQFM164_S02g000051 | gene3710 | 0.18 | 18 |
| HG792016.1 | PROQFM164_S02g000051 | gene3710 | 0.18 | 18 |
| HG792016,1 | PROQFM164_S02g000051 | gene3710 | 0.18 | 18 |
| HG792016.1 | PROQFM164_S02g000051 | gene3710 | 0.18 | 18 |
| HG792016.1 | PROQFM164_S02g000051 | gene3710 | 0.18 | 18 |
| HG792016.1 | PROQFM164_S02g000051 | gene3710 | 0.18 | 18 |
| HG792016.1 | PROQFM164_S02g000051 | gene3710 | 0.19 | 19 |
| HG792016.1 | PROQFM164_S02g000051 | gene3710 | 0.18 | 18 |
| HG792016.1 | PROQFM164_S02g000051 | gene3710 | 0.17 | 17 |
| HG792016.1 | PROQFM164_S02g000051 | gene3710 | 0.17 | 17 |
| HG792016.1 | PRQQFM164_S02g000051 | gene3710 | 0.16 | 16 |
| HG792016.1 | PROQFM164_S02g000051 | gene3710 | 0.16 | 16 |
| HG792016.1 | PROQFM164_S02g000051 | gene3710 | 0.16 | 16 |
| HG792016.1 | PROQFM164_S02g000051 | gene3710 | 0.15 | 15 |
| HG792016.1 | PROQFM164_S02g000051 | gene3710 | 0.14 | 14 |
| HG792016.1 | PROQFM164_S02g000051 | gene3710 | 0.12 | 12 |
| HG792016.1 | PROQFM164_S02g000051 | gene3710 | 0.10 | 10 |
| HG792016.1 | PROQFM164_S02g000051 | gene3710 | 0.10 | 10 |
| HG792019.1 | PROQFM164_S05g000563 | gene10538 | 0.92 | 92 |
| HG792019.1 | PROQFM164_S05g000563 | gene10538 | 0.114 | 114 |
| HG792019.1 | PROQFM164_S05g000563 | gene10538 | 0.65 | 65 |
| HG792019.1 | PROQFM164_S05g000563 | gene10538 | 0.62 | 62 |
| HG792019.1 | PROQFM164_S05g000563 | gene10538 | 0.73 | 73 |
| HG792019.1 | PROQFM164_S05g000563 | gene10538 | 2.33 | 35 |

TABLE B
Differences between reference genome and strain 12A

| | | | | | | | | RefCov, | |
|---|---|---|---|---|---|---|---|---|---|
| Contig | Position | Ref | Alt | Type | Rank | Gene | GeneID | AltCov | TotalCov |
| HG792015.1 | 6997837 | G | A | synonymous_variant | LOW | PROQFM164_S01g002951 | gene2947 | 2.55 | 57 |
| HG792015.1 | 6998275 | T | G | synonymous_variant | LOW | PROQFM164_S01g002951 | gene2947 | 0.103 | 103 |
| HG792015.1 | 6999075 | A | G | missense_variant | MODERATE | PROQFM164_S01g002951 | gene2947 | 1.110 | 111 |
| HG792015.1 | 6999088 | T | C | synonymous_variant | LOW | PROQFM164_S01g002951 | gene2947 | 0.113 | 113 |
| HG792015.1 | 6999238 | A | G | synonymous_variant | LOW | PROQFM164_S01g002951 | gene2947 | 0.81 | 81 |
| HG792015.1 | 6999343 | G | T | synonymous_variant | LOW | PROQFM164_S01g002951 | gene2947 | 0.97 | 97 |
| HG792015.1 | 6999601 | A | G | synonymous_variant | LOW | PROQFM164_S01g002951 | gene2947 | 1.26 | 27 |
| HG792016.1 | 109562 | A | G | synonymous_variant | LOW | PROQFM164_S02g000051 | gene3710 | 0.42 | 42 |
| HG792016.1 | 109794 | A | G | missense_variant | MODERATE | PROQFM164_S02g000051 | gene3710 | 1.71 | 72 |
| HG792019.1 | 1321866 | C | G, T | synonymous_variant | LOW | PROQFM164_S05g000563 | gene10538 | 0,57,4 | 61 |
| HG792019.1 | 1321966 | TG | T | frameshift_variant | HIGH | PROQFM164_S05g000563 | gene10538 | 50.10 | 60 |

TABLE C
Differences between reference genome and strain A22

| Contig | Position | Ref | Alt | Type |
|---|---|---|---|---|
| HG792015.1 | 6999633 | A | ACAACAGCAGCAACAGCGAAGC | conservative_inframe_insertion |
| HG792016.1 | 109127 | C | T | synonymous_variant |
| HG792016.1 | 109130 | C | T | synonymous_variant |
| HG792016.1 | 109138 | C | T | missense_variant |
| HG792016.1 | 109144 | C | T | missense_variant |
| HG792016.1 | 109151 | C | T | splice_region_variant&synonymous_variant |
| HG792016.1 | 109215 | C | T | stop_gained |
| HG792016.1 | 109224 | C | T | stop_gained |
| HG792016.1 | 109242 | C | T | stop_gained |
| HG792016.1 | 109245 | C | T | missense_variant |
| HG792016.1 | 109256 | C | T | synonymous_variant |
| HG792016.1 | 109272 | C | T | missense_variant |
| HG792016.1 | 109554 | C | T | missense_variant |
| HG792016.1 | 109557 | C | T | missense_variant |
| HG792016.1 | 109561 | C | T | missense_variant |
| HG792016.1 | 109575 | C | T | stop_gained |
| HG792016.1 | 109624 | C | T | missense_variant |
| HG792016.1 | 109625 | A | G | synonymous_variant |
| HG792016.1 | 109627 | C | T | missense_variant |
| HG792016.1 | 109640 | C | T | synonymous_variant |
| HG792016.1 | 109643 | C | T | synonymous_variant |
| HG792019.1 | 1321265 | T | C | synonymous_variant |
| HG792019.1 | 1321268 | C | T | synonymous_variant |
| HG792019.1 | 1321292 | T | G | synonymous_variant |
| HG792019.1 | 1321293 | G | T | missense_variant |
| HG792019.1 | 1321297 | C | A | missense_variant |
| HG792019.1 | 1321298 | A | G | synonymous_variant |
| HG792019.1 | 1321760 | C | T | missense_variant |
| HG792019.1 | 1321767 | T | C | synonymous_variant |
| HG792019.1 | 1321850 | T | C | missense_variant |
| HG792019.1 | 1321857 | A | G | synonymous_variant |
| HG792019.1 | 1321863 | G | A | synonymous_variant |
| HG792019.1 | 1321866 | C | T | synonymous_variant |
| HG792019.1 | 1321872 | A | G | synonymous_variant |
| HG792019.1 | 1321876 | G | A | synonymous_variant |
| HG792019.1 | 1321884 | C | T | synonymous_variant |
| HG792019.1 | 1321893 | G | T | synonymous_variant |
| HG792019.1 | 1321896 | A | G | synonymous_variant |
| HG792019.1 | 1321920 | C | A | synonymous_variant |
| HG792019.1 | 1321966 | T | C | missense_variant |
| HG792019.1 | 1322028 | G | A | synonymous_variant |

| | | | | RefCov, | |
|---|---|---|---|---|---|
| Contig | Rank | Gene | GeneID | AltCov | TotalCov |
| HG792015.1 | MODERATE | PROQFM164_S01g002951 | gene2947 | 2.12 | 14 |
| HG792016.1 | LOW | PROQFM164_S02g000051 | gene3710 | 78.59 | 137 |
| HG792016.1 | LOW | PROQFM164_S02g000051 | gene3710 | 76.60 | 136 |
| HG792016.1 | MODERATE | PROQFM164_S02g000051 | gene3710 | 77.59 | 136 |
| HG792016.1 | MODERATE | PROQFM164_S02g000051 | gene3710 | 73.60 | 133 |
| HG792016.1 | LOW | PROQFM164_S02g000051 | gene3710 | 70.60 | 130 |
| HG792016.1 | HIGH | PROQFM164_S02g000051 | gene3710 | 76.69 | 145 |
| HG792016.1 | HIGH | PROQFM164_S02g000051 | gene3710 | 75.70 | 145 |
| HG792016.1 | HIGH | PROQFM164_S02g000051 | gene3710 | 80.73 | 153 |
| HG792016.1 | MODERATE | PROQFM164_S02g000051 | gene3710 | 78.73 | 152 |
| HG792016.1 | LOW | PROQFM164_S02g000051 | gene3710 | 79.75 | 154 |
| HG792016.1 | MODERATE | PROQFM164_S02g000051 | gene3710 | 75.81 | 156 |
| HG792016.1 | MODERATE | PROQFM164_S02g000051 | gene3710 | 62.92 | 154 |
| HG792016.1 | MODERATE | PROQFM164_S02g000051 | gene3710 | 61.92 | 153 |
| HG792016.1 | MODERATE | PROQFM164_S02g000051 | gene3710 | 62.92 | 154 |
| HG792016.1 | HIGH | PROQFM164_S02g000051 | gene3710 | 64.90 | 154 |
| HG792016.1 | MODERATE | PROQFM164_S02g000051 | gene3710 | 64.88 | 152 |
| HG792016.1 | LOW | PROQFM164_S02g000051 | gene3710 | 65.86 | 151 |
| HG792016.1 | MODERATE | PROQFM164_S02g000051 | gene3710 | 66.86 | 152 |
| HG792016.1 | LOW | PROQFM164_S02g000051 | gene3710 | 60.87 | 147 |
| HG792016.1 | LOW | PROQFM164_S02g000051 | gene3710 | 60.87 | 147 |
| HG792019.1 | LOW | PROQFM164_S05g000563 | gene10638 | 85.20 | 105 |
| HG792019.1 | LOW | PROQFM164_S05g000563 | gene10538 | 85.20 | 105 |
| HG792019.1 | LOW | PROQFM164_S05g000563 | gene10538 | 88.8 | 96 |
| HG792019.1 | MODERATE | PROQFM164_S05g000563 | gene10538 | 88.8 | 96 |
| HG792019.1 | MODERATE | PROQFM164_S05g000563 | gene10538 | 89.8 | 97 |
| HG792019.1 | LOW | PROQFM164_S05g000563 | gene10538 | 88.8 | 96 |
| HG792019.1 | MODERATE | PROQFM164_S05g000563 | gene10538 | 71.81 | 152 |
| HG792019.1 | LOW | PROQFM164_S05g000563 | gene10538 | 68.82 | 150 |
| HG792019.1 | MODERATE | PROQFM164_S05g000563 | gene10538 | 52.11 | 63 |
| HG792019.1 | LOW | PROQFM164_S05g000563 | gene10538 | 52.11 | 63 |
| HG792019.1 | LOW | PROQFM164_S05g000563 | gene10538 | 52.12 | 64 |
| HG792019.1 | LOW | PROQFM164_S05g000563 | gene10538 | 53.13 | 66 |
| HG792019.1 | LOW | PROQFM164_S05g000563 | gene10538 | 52.14 | 66 |
| HG792019.1 | LOW | PROQFM164_S05g000563 | gene10538 | 52.16 | 68 |
| HG792019.1 | LOW | PROQFM164_S05g000563 | gene10538 | 56.20 | 76 |
| HG792019.1 | LOW | PROQFM164_S05g000563 | gene10538 | 56.21 | 77 |
| HG792019.1 | LOW | PROQFM164_S05g000563 | gene10538 | 56.24 | 80 |
| HG792019.1 | LOW | PROQFM164_S05g000563 | gene10538 | 64.32 | 96 |
| HG792019.1 | MODERATE | PROQFM164_S05g000563 | gene10538 | 57.41 | 98 |
| HG792019.1 | LOW | PROQFM164_S05g000563 | gene10538 | 70.48 | 118 |

TABLE D
Differences between reference genome and strain B20

| | | | | | | RefCov, | |
|---|---|---|---|---|---|---|---|
| Ref | Alt | Type | Rank | Gene | GeneID | AltCov | TotalCov |
| ACAGCGAAGC | A | disruptive_inframe_deletion | MODERATE | PROQFM164_S01g002951 | gene2947 | 6.17 | 23 |
| T | A | synonymous_variant | LOW | PROQFM164_S02g000051 | gene3710 | 0.44 | 44 |
| A | G | missense_variant | MODERATE | PROQFM164_S02g000051 | gene3710 | 0.46 | 46 |
| T | C | synonymous_variant | LOW | PROQFM164_S02g000051 | gene3710 | 0.46 | 46 |
| A | G | synonymous_variant | LOW | PROQFM164_S02g000051 | gene3710 | 0.43 | 43 |
| T | G | missense_variant | MODERATE | PROQFM164_S02g000051 | gene3710 | 0.43 | 43 |
| A | G | missense_variant | MODERATE | PROQFM164_S02g000051 | gene3710 | 0.39 | 39 |
| T | C | synonymous_variant | LOW | PROQFM164_S02g000051 | gene3710 | 0.21 | 21 |
| G | A | missense_variant | MODERATE | PROQFM164_S02g000051 | gene3710 | 0.19 | 19 |
| C | G | missense_variant | MODERATE | PROQFM164_S02g000051 | gene3710 | 0.17 | 17 |
| A | C | synonymous_variant | LOW | PROQFM164_S02g000051 | gene3710 | 0.17 | 17 |
| C | T | missense_variant | MODERATE | PROQFM164_S02g000051 | gene3710 | 0.16 | 16 |
| G | A | missense_variant | MODERATE | PROQFM164_S02g000051 | gene3710 | 0.13 | 13 |
| CTTCT | C | frameshift_variant | HIGH | PROQFM164_S02g000051 | gene3710 | 0.8 | 8 |
| T | C | synonymous_variant | LOW | PROQFM164_S02g000051 | gene3710 | 0.14 | 14 |
| A | G | synonymous_variant | LOW | PROQFM164_S02g000051 | gene3710 | 0.77 | 77 |
| G | A | synonymous_variant | LOW | PROQFM164_S02g000051 | gene3710 | 0.77 | 77 |
| C | G | synonymous_variant | LOW | PROQFM164_S02g000051 | gene3710 | 0.76 | 76 |
| C | T | synonymous_variant | LOW | PROQFM164_S02g000051 | gene3710 | 0.72 | 72 |
| C | T | synonymous_variant | LOW | PROQFM164_S02g000051 | gene3710 | 0.65 | 65 |
| T | C | synonymous_variant | LOW | PROQFM164_S02g000051 | gene3710 | 0.62 | 62 |
| A | T | missense_variant | MODERATE | PROQFM164_S02g000051 | gene3710 | 0.59 | 59 |
| A | G | synonymous_variant | LOW | PROQFM164_S02g000051 | gene3710 | 0.58 | 58 |
| G | A | missense_variant | MODERATE | PROQFM164_S02g000051 | gene3710 | 0.58 | 58 |
| A | C | synonymous_variant | LOW | PROQFM164_S02g000051 | gene3710 | 0.12 | 12 |
| C | G | synonymous_variant | LOW | PROQFM164_S02g000051 | gene3710 | 0.14 | 14 |
| C | A | missense_variant | MODERATE | PROQFM164_S02g000051 | gene3710 | 0.26 | 26 |
| T | G | missense_variant | MODERATE | PROQFM164_S02g000051 | gene3710 | 0.27 | 27 |
| G | C | missense_variant | MODERATE | PROQFM164_S02g000051 | gene3710 | 0.28 | 28 |
| A | G | missense_variant | MODERATE | PROQFM164_S02g000051 | gene3710 | 0.31 | 31 |
| G | A | missense_variant | MODERATE | pROQFM164_S02g000051 | gene3710 | 0.38 | 38 |
| G | A | synonymous_variant | LOW | PROQFM164_S02g000051 | gene3710 | 0.46 | 46 |
| T | C | synonymous_variant | LOW | PROQFM164_S05g000563 | gene10538 | 84.8 | 92 |
| A | G | missense_variant | MODERATE | PROQFM164_S05g000563 | gene10538 | 80.17 | 97 |
| A | G | synonymous_variant | LOW | PROQFM164_S05g000563 | gene10538 | 83.19 | 102 |
| G | T | missense_variant | MODERATE | PROQFM164_S05g000563 | gene10538 | 116.13 | 129 |
| G | A | synonymous_variant | LOW | PROQFM164_S05g000563 | gene10538 | 118.13 | 131 |
| A | G | synonymous_variant | LOW | PROQFM164_S05g000563 | gene10538 | 115.11 | 126 |
| A | G | synonymous_variant | LOW | PROQFM164_S05g000563 | gene10538 | 158.36 | 194 |
| T | C | missense_variant | MODERATE | PROQFM164_S05g000563 | gene10538 | 159.35 | 194 |
| C | T | synonymous_variant | LOW | PROQFM164_S05g000563 | gene10538 | 159.35 | 194 |
| C | A, G | synonymous_variant | LOW | PROQFM164_S05g000563 | gene10538 | 68,90,34 | 192 |
| TG | CG, T | frameshift_variant | HIGH | PROQFM164_S05g000563 | gene10538 | 73,73,26 | 172 |
| G | A | synonymous_variant | LOW | PROQFM164_S05g000563 | gene10538 | 144.21 | 165 |
| G | A, T | synonymous_variant | LOW | PROQFM164_S05g000563 | gene10538 | 74,64,19 | 157 |
| T | C | synonymous_variant | LOW | PROQFM164_S05g000563 | gene10538 | 73.53 | 126 |
| C | T | synonymous_variant | LOW | PROQFM164_S05g000563 | gene10538 | 70.48 | 118 |
| G | A | missense_variant | MODERATE | PROQFM164_S05g000563 | gene10538 | 70.46 | 116 |
| A | C | synonymous_variant | LOW | PROQFM164_S05g000563 | gene10538 | 75.43 | 118 |
| C | T | missense_variant | MODERATE | PROQFM164_S05g000563 | gene10538 | 71.32 | 103 |
| C | T | missense_variant | MODERATE | PROQFM164_S05g000563 | gene10538 | 70.32 | 102 |
| T | A | missense_variant | MODERATE | PROQFM164_S05g000563 | gene10538 | 70.31 | 101 |
| C | G | missense_variant | MODERATE | PROQFM164_S05g000563 | gene10538 | 70.27 | 97 |
| G | A | synonymous_variant | LOW | PROQFM164_S05g000563 | gene10538 | 73.27 | 100 |
| T | C | missense_variant | MODERATE | PROQFM164_S05g000563 | gene10538 | 73.27 | 100 |
| C | T | missense_variant | MODERATE | PROQFM164_S05g000563 | gene10538 | 75.20 | 95 |
| T | C | synonymous_variant | LOW | PROQFM164_S05g000563 | gene10538 | 74.20 | 94 |
| A | G | synonymous_variant | LOW | PROQFM164_S05g000563 | gene10538 | 77.19 | 96 |

[0038] A second aspect of the present invention provides derivative Penicillium strains having altered spore colour compared to a corresponding unmodified (control) strain.

[0039] Almost all Penicillium species naturally produce spores exhibiting a green to blue to grey colour on standard growth media (for example, CYA, MEA, PDA, ACM), although the precise colour can vary somewhat depending on the growth media, with a few species, such as P. camemberti, producing white spores.

[0040] The altered spore colour may result from a change in the pigment development pathway of the Penicillium strain. However, some spores have been known to change colour without any change in currently known pigment developmental pathways.

[0041] The main pigment development pathway of Penicillium and related Aspergillus species is well known and is described in, for example, Woo et al., 2010 (High diversity of polyketide synthase genes and the melanin biosynthesis gene cluster in Penicillium marneffei. FEBS Journal 277; 3750-3758) and Krijgsheld et al., 2013 (Development in Aspergillus. Studies in Mycology 74: 1-29) and is also shown in FIG. 9 herein.

[0042] The term “altered pigment development pathway” as defined herein is a change in the pigment (melanin) development pathway compared to the pigment development pathway of an unmodified strain and which change causes the derivative to produce spores of a different colour compared to the corresponding unmodified strain.

[0043] Reference herein to a “derivative” strain is taken to mean a Penicillium strain which has been modified to produce spores which differ in colour compared to the strain from which it is derived. Reference herein to being “derived from” any given strain encompasses being physically derived from that strain as well as methods for artificial sequence synthesis.

[0044] The terms “spores” and “conidia” are used interchangeably herein.

[0045] In one embodiment, the derivative strain produces spores which are not the typical green or blue-green colour associated with blue cheese.

[0046] According to one embodiment, the derivative Penicillium strains produce spores which may be any one or more of the following colours: light olive-brown, brown, reddish-brown-pink, intense to light blue, green and albino. The light olive-brown, brown, reddish-brown-pink, intense to light blue, green or albino spore colour may result from an altered pigment development pathway compared to a corresponding unmodified (control) strain.

[0047] There are many ways of determining the colour of fungal spores, but typically this is done by eye. Colour may also be scored using a suitable chart, such as the Methuen colour plate (Methuen Handbook of Colour (second edition), by A. Kornerup & J H Wanscher, published by Methuen Publishing (1967)). For example, the light olive-brown strains may be encompassed by Methuen colour plate ranges 2-5; brown by Methuen colour plate ranges 6-7; reddish-brown-pink by Methuen colour plate ranges 8-10; intense to light blue by Methuen colour plate ranges 20-24; green by Methuen colour plate ranges 26-30; and albino being characterised by an absence of colour.

[0048] According to one embodiment, the derivative Penicillium strains produce spores which are not blue-green in colour (for example as encompassed by “Methuen” colour plate 25). According to one embodiment, the derivative strains produce spores which are not albino.

[0049] According to an embodiment, the Penicillium strain to be modified is a Penicillium strain as defined in any one or more of (a) to (g) in the first aspect of the invention. For example, the derivative may be a derivative of strain 5A, 12A, A22 or B20, which derivative produces spores of a different colour to the spore colour of 5A, 12A, A22 or B20. This change in colour may be due to a change in the pigment development pathway and/or may be due to the growth media used.

[0050] The derivative may be a variant of strain 5A, 12A, A22 or B20 having at least 99.0%, 99.1%, 99.2%, 99.3%, 99.4%, 99.5%, 99.6%, 99.7%, 99.8%, 99.9% or more sequence identity thereto on a DNA level and having the capacity to produce spores which differ in colour compared to the corresponding unmodified strain.

[0051] The derivative may have the same or similar biological and functional characteristics as the strain from which it was derived. The derivative strain may have a different or similar organoleptic, for example flavour profile, to the strain from which it was derived. The derivative may have similar or different activities or levels of various enzymes and/or levels of certain secondary metabolites to the strain from which it was derived.

[0052] Derivative strains having an altered pigment development pathway may show altered (for example, increased or decreased or substantially eliminated) expression of one or more of the following metabolites involved in melanin production: heptaketide naphthopyrone; 1,3,6,8-tetrahydroxynaphthalene; scytalone; 1,3,8-trihydroxynaphthalene; vermelone; 1,8-dihydroxynaphthalene or other metabolites produced as a result of the action of one or more of the following genes: abr1 (SEQ ID NO: 1), abr2 (SEQ ID NO: 2), alb1 (SEQ ID NO: 3), arp1 (SEQ ID NO: 4), arp2 (SEQ ID NO: 5), ayg1 (SEQ ID NO: 6). The change typically leads to the development of spores having a pigment which differs from the spore colour of the corresponding unmodified strain (control). The pigment may be any colour which differs from that of the control. The colour may optionally be light olive-brown, brown, reddish-brown-pink, intense to light blue, green and albino.

[0053] The pigment development pathway of Penicillium strains may be altered using mutagenesis, through for example U.V., X-ray or chemical mutagenesis. Other methods to alter the pigment development pathway include, without limitation, various methods for editing nucleic acid, for example to cause gene knockout, knock-in or expression of a gene to be downregulated or overexpressed, or to introduce mutations in the form of one or more deletions, insertions or substitutions. For example, use of various nuclease systems, such as zinc finger nucleases (ZFN), transcription activator-like effector nucleases (TALEN), meganucleases, or combinations thereof are known in the art for editing nucleic acid and may be used in the present invention. In recent times, the clustered regularly interspersed short palindromic repeats (CRISPR)/CRISPR-associated (Cas) (CRISPR/Cas) nuclease system has become more commonly used for genome engineering. The CRISPR/Cas system is detailed in, for example WO2013/176772, WO2014/093635 and WO2014/089290.

[0054] For example, a CRISPR/Cas9 may include a guide RNA (gRNA) sequence with a binding site for Cas9 and a targeting sequence specific for the area to be modified. The Cas9 binds the gRNA to form a ribonucleoprotein that binds and cleaves the target area. In addition to the CRISPR/Cas 9 platform (which is a type II CRISPR/Cas system), alternative systems exist including type I CRISPR/Cas systems, type III CRISPR/Cas systems, and type V CRISPR/Cas systems. Any of the above CRISPR systems may be used to alter the pigment development pathway of Penicillium strains by, for example, altering one or more of the following genes: Alb1, Ayg1, Arp2, Arp1, Abr1, Abr2. The aforementioned genes may be represented by SEQ ID NO: 1 (abr1), SEQ ID NO: 2 (abr2), SEQ ID NO: 3 (alb1), SEQ ID NO: 4 (arp1), SEQ ID NO: 5 (arp2), SEQ ID NO: 6 (ayg1) or by the corresponding gene in the strain to be modified or by a sequence having at least 99.0%, 99.1%, 99.2%, 99.3%, 99.4%, 99.5%, 99.6%, 99.7%, 99.8%, 99.9% or more sequence identity on a DNA or protein level to any of SEQ ID Nos 1 to 6 or to a protein encoded by any one of SEQ ID Nos 1 to 6.

[0055] Therefore, one of the aforementioned techniques (or other suitable technique) may be used in a method for the production of Penicillium strains having conidia (spores) of a colour or colours that differs from that of the control (the strain selected for modification). The colour of the resulting derivative strain may be light olive-brown, brown, reddish-brown-pink, pink, green, intense blue to light blue and albino, typically as a result of mutation in genes in the pigment biosynthetic pathway.

[0056] A preferred method comprises mutating Penicillium strains by exposing fungal material, such as spores or hyphae, to UV irradiation, or to X-rays or to a chemical mutagen or to any other suitable mutagen. Normally a dose response curve will be determined and then conditions identified where fungal material shows a survival rate up to 20% of original material. Such strains surviving the mutagenesis would be expected to have single or multiple mutations in the genome, which might range from single base pair changes in the DNA sequence through to possible gross chromosomal rearrangements.

[0057] The method of producing a derivative Penicillium strain may comprise the step of mutating the strain to change the colour of the spores produced. The strain to be mutated (or otherwise modified using other techniques) may be any strain and may have been produced through asexual or sexual reproduction. The method may be carried out as a standalone method or may be carried out after a sexual cross. The method may be used to produce strains with changed spore colour compared to the unmodified strain. For example, the derivative strains may produce spores of light olive-brown, brown, reddish-brown, reddish-brown-pink, pink, green, albino, intense blue to light blue in colour. Optionally, the method does not produce albino spores. Optionally the method does not produce spores having the conventional green or blue-green colour of known blue cheeses. Such strains may then be used to produce cheeses with different coloured veins and/or surfaces, either of single colours or multiple colours.

[0058] The altered spore colour of the derivative may additionally or alternatively be achieved by growing the strains to be modified on suitable growth media (for example potato dextrose agar or milk amended agar media).

[0059] According to a third aspect of the present invention, there is provided a method of altering the colour of spores of a Penicillium strain, comprising altering the pigment development pathway compared to a control (unmodified strain). The altering of the pigment development pathway may be carried out by any one or more of: U.V., X-ray or chemical mutagenesis, gene editing techniques, gene transformation (for example, to overexpress or downregulate one or more of the following genes: Alb1, Ayg1, Arp2, Arp1, Abr1, Abr2). The aforementioned genes may be represented by SEQ ID NO: 1 (abr1), SEQ ID NO: 2 (abr2), SEQ ID NO: 3 (alb1), SEQ ID NO: 4 (arp1), SEQ ID NO: 5 (arp2), SEQ ID NO: 6 (ayg1) or by the corresponding gene in the strain to be modified or by a sequence having at least 99.0%, 99.1%, 99.2%, 99.3%, 99.4%, 99.5%, 99.6%, 99.7%, 99.8%, 99.9% or more sequence identity on a DNA level to any of SEQ ID NOs 1 to 6 or to a protein encoded by any one of SEQ ID Nos 1 to 6.

[0060] The method also comprises the step of selecting for progeny having spores of altered colour compared to the unmodified strain.

[0061] The invention therefore provides, a method of altering the colour of spores of a Penicillium strain, comprising altering the pigment development pathway compared to a corresponding unmodified strain and optionally selecting for progeny having spores of altered colour compared to the unmodified strain. The Penicillium strain is preferably a strain of Penicillium roqueforti. According to one embodiment, the Penicillium strain to be modified is strain 5A, 12A, A22 or B20 or a strain having at least 99.0%, 99.1%, 99.2%, 99.3%, 99.4%, 99.5%, 99.6%, 99.7%, 99.8%, 99.9% or more sequence identity to the genomic DNA sequence of strains 5A, 12A, A22 and B20. The genomic sequence for the aforementioned strains is provided as SEQ ID NOs: 7-54 (5A), SEQ ID NOs: 55-102 (12A), SEQ ID NOs 103-150 (A22) and SEQ ID NOs 151-198 (B20). The at least 99.0% sequence identity may be with reference to the SEQ ID NO provided herein or to the genomic sequence of the strain as deposited under the Budapest Treaty at the Westerdijk Fungal Biodiversity Institute: CBS 145358 (5A), CBS 145359 (12A), CBS 145360 (A22) and CBS 145361 (B20).

[0062] A fourth aspect of the present invention provides fungal spores obtainable (or obtained) by a method according to the third aspect of the invention, which spores differ in colour compared to spores of the corresponding unmodified (or control) strain. Also provided are fungal strains comprising such spores.

[0063] The novel strains listed under points (a) to (g) in the first aspect of the invention and variants and derivatives thereof may have a different organoleptic, for example flavour profile, compared to existing production strains or compared to the organoleptic profile of either one or both parents or an unmodified strain.

[0064] The flavour of mould-ripened cheeses is determined by a number of volatile and non-volatile chemicals as listed in Table 1 below. Of these, methyl ketones such as 2-undecanone, 2-nonanone and 2-heptanone are particularly responsible for blue-cheese flavour, but other ketones such as 2-hexanone, 2-pentanone and 2-butanone together with alcohols such as 1-octen-3-ol and 2-heptanol also contribute to flavour. For example, Roquefort cheese characteristically contains 2-heptanone as the most abundant ketone followed by 2-nonanone. Whereas in Stilton cheese the dominant ketones are 2-heptanone, 2-butanone and 2-pentanone.

TABLE 1

| Volatile | Non-volatile |
|---|---|
| Methyl Ketones | Organic acids |
| Fatty acids (short chain) | Fatty acids (long chain) |
| 2-Alkanols | Fatty acid soaps |
| Aldehydes | Alcohols |
| Amines | Amino acids |
| Esters | Secondary amines |
| Sulfides | Peptides |
| Lactones | |

[0065] The levels of production of volatile chemicals can be determined using methods such as gas chromatography mass spectroscopy (GC-MS). Data can then be analysed by principal component analysis to indicate the flavour profiles given by strains of Penicillium roqueforti, as determined by the relative production of 15 or more volatile chemicals which are assessed (for example, 2-undecanone, 2-decanone, 2-pentanol, 2-nonanol, 2-nonanone, 2-heptanol, 8-nonen-2-one, 2-octanone, 2-pentanone, 2-heptanone, 2-hexanione, 1-pentanol, 2-methy butanal, 3-methyl butanal, isoamyl isobutanol, 3-methyl butanol, 3-octanone). By determining the relative levels of volatile chemicals produced, the identity of strains used in production of Roquefort, Stilton and Gorganzola cheeses can be determined. This technique can also allow the identification of novel strains of Penicillium roqueforti produced by sexual crossing, which occupy novel flavour spaces due to differential levels of production of the volatile flavour chemicals and differing enzyme levels and activity. For example, novel strains can be generated producing high or low levels of 2-undecanone and/or 2-nonanone with relatively low production of 3-octanone and/or 3-methyl butanol, relative to either one or both parental strains or unmodified or known strain. Similarly other novel strains contain high levels of 2-pentanol and/or 2-heptanol with either high or low levels of 2-undecanone and 2-nonanol, relative to either one or both parental strains or unmodified or known strain. Strains may show a 2 to 20-fold or more difference in levels of 2-undecanone production compared to either one or both parent strains or unmodified or known strain. Strains may show a 2 to 20-fold, or more difference in levels of 2-nonanone production compared to either one or both parent strain or unmodified or known strain. Strains may show a 2 to 20-fold or more difference in levels of 3-octanone production compared to either parent strain or unmodified or known strain. Strains may show a 2 to 20-fold or more difference in levels of 3-methyl butanol production compared to either one or both parent strain or unmodified or known strain. Strains may show a 2 to 20-fold or more difference in levels of 2-heptanol production compared to either one or both parent strains or unmodified or known strains.

[0066] The altered levels and/or activity of enzymes such as proteases and/or lipases may also have an effect on a final product. For example, if used in a cheese, a fungal strain with increased protease activity may result in faster maturation of the cheese, thereby reducing production costs. Similarly, strains with increased lipase activity might also result in faster maturation, and at the same time exhibit a novel flavour spectrum and other organoleptic qualities due to increased production of volatile flavour compounds.

[0067] The novel strains listed under points (a) to (g) in the first aspect of the invention and variants and derivatives thereof suitably have a novel organoleptic, for example flavour, profile compared to one or both parents in the case of sexually derived strains, or have different flavour profiles compared to existing cheese production strains in the case of strains isolated from the environment.

[0068] Strains 5A, 12A, A22 and B20 produce blue-green coloured spores. Strain A22 when used in cheese production produces an intense-flavoured blue cheese, strain B20 a mild-flavoured blue cheese, strain 5A a classic yet tangy/fruity blue-cheese flavour, whilst strain 12A produces an aromatic, earthy flavour blue cheese. Although the final flavour of the cheese will also depend on other factors such as the type of milk, method of cheese production etc., (aside from the strain of Penicillium roqueforti used), the flavour contributed by the Penicillium strain (for example, intense, mild, tangy, fruity, earthy etc.) will remain unchanged.

[0069] The novel strains listed under points (a) to (g) in the first aspect of the invention and variants and derivatives thereof are strains of Penicillium. Any of the commercially-relevant Penicillium strains, particularly those suitable for use in food products, particularly in the production of cheese may be useful in the invention. For example, the Penicillium may be Penicillium roqueforti, Penicillium paneum, Penicillium glaucum or Penicillium camemberti. The strain may be a Stilton-type, Roquefort-type or Gorgonzola-type strain.

[0070] According to a fifth aspect of the present invention, there is provided use in industry of the novel strains listed under points (a) to (g) in the first aspect of the invention and variants and derivatives thereof. The novel strains, variants and derivatives thereof are not only useful in the food industry, for example in cheese production, but may also find use in nutraceutical production; agricultural applications; bioremediation; enzyme production (particularly in the production of lipases and proteases); fermentation process, for example in the production of biofuels, or in hay or silage production; or in the production of or in animal feed.

[0071] For example, the novel strains, variants and derivatives thereof may find use in bioremediation, for example in the degradation of various herbicides, fungicides etc. Other bioremediation applications include treating metal accumulation and possible metal recovery of contaminated soil.

[0072] The Penicillium strains of the invention may find use in fermentation processes, for example in the degradation of biomasses, for the recovery of cellulose, sugars and/or for ethanol production. Penicillium roqueforti, for example, has been described in Mioso et al., 2014, (Journal of Applied Microbiology 118, 781-791) as a natural candidate for industrial biotechnological production given its many other favourable fermentation characteristics, such as its tolerance for growing at low pH values and the ability to use both pentoses and hexoses as substrates.

[0073] The novel strains, variants and derivatives thereof may be used in the production of enzymes, not just in the production of lipases and proteases, but also in the production of decarboxylases and deaminases. The enzymes produced by Penicillium roqueforti may be used in diverse industries, including biotechnology, in food, chemical, pharmaceutical and agricultural industries.

[0074] The novel strains, variants and derivatives thereof may find use in applications where increased digestibility of a substrate is required, such as in agricultural applications, in feed stocks and silaging.

[0075] The novel strains, variants and derivatives may find use in in the food industry, not just in cheese production, but more widely for food preparation where the fermentative and enzymatic properties of the strains may be used.

[0076] Strains produced by the methods of the invention may also be used in the production of other useful metabolites. For example, it has been suggested that Penicillium roqueforti might produce health-promoting metabolites that contribute to the so-called ‘French paradox’. Therefore, the sexual crossing process could be used to produce sexual offspring which could be selected for the production of increased levels of such beneficial metabolites.

[0077] According to a sixth aspect of the invention, there is provided a composition comprising any of the aforementioned novel strains, variants and derivatives thereof and an acceptable carrier. In certain embodiments, the carrier is an agriculturally acceptable carrier. In some embodiments, the carrier is suitable for nutraceutical administration. In further embodiments, the carrier is suitable for use for food applications. In further embodiments, the carrier is suitable for bioremediation applications.

[0078] In certain embodiments, the aforementioned composition comprises at least one additional bacteria or fungus, selected according to the end application.

[0079] According to a seventh aspect of the present invention, there is provided a food product produced by or comprising the strain and/or variant and/or derivative of the invention. The food product is preferably a dairy product. The term ‘dairy product’ is not limited to milk from cows, but also encompasses sheep, goat, buffalo and other sources of milk. The dairy product is preferably cheese, optionally a mould-ripened cheese. The food product may be an item to be used in the manufacture of a food product, such as a starter culture or (dry) cheese ingredient, or may be in its final “ready-to-consume” form. The food product may be a starter culture, a cheese, cheese sauce, cheese spread, dry cheese ingredient etc.

[0080] The cheese may be a hard or soft cheese. The fungal strains may be contained in veins in the cheese and/or may be found on the surface of the cheese. The Penicillium may be in the veins of a cheese, in particular if the strain has been mutated or otherwise modified to produce spores of a different colour than that of the wild type strain or other control. Commonly this type of cheese is referred to as a blue cheese due to the colour of the fungal spores in the veins. The cheese may be ripened by a Penicillium internal and/or external mould.

[0081] The invention also provides a cheese or cheese product with veins of Penicillium wherein the Penicillium strain produces spores which are light olive-brown, brown, light brown, olive brown, reddish, reddish-brown, reddish-brown-pink, pink, green, intense blue to light blue or albino. The cheese (or cheese product) may comprise multiple strains to produce a variety of colours in the end product. The cheese or cheese product may comprise the strain and/or variant and/or derivative in addition to other moulds.

[0082] The cheese may be selected from a Roquefort, Bleu de Bresse, Bleu du Vercors-Sassenage, Brebiblu, Cabrales, Cambozola (Blue Brie), Cashel Blue, Danish blue, blue Cheddar, Fourme d′Ambert, Fourme de Montbrison, Lanark Blue, Maytag Blue, Strathdon Blue, Blue Murder, Shropshire Blue, Dorset blue vinney, Brighton blue, Moyden's Wrekin blue, picos blue, cabrales, rokpol, dolcelatte, Stilton, and some varieties of Bleu d′Auvergne, a Gorgonzola, a Brie, a Camembert, as well as other blue cheeses or any other cheese ripened by a Penicillium internal or external mould.

[0083] The cheese or cheese product may be any known cheese or cheese product which has been produced using a novel strain, variant or derivative according to the invention, or into which such strain(s), variant(s) or derivative(s) have been introduced. Use of the strain may impart a colour or multiple colours to the resultant product.

[0084] The cheese or cheese product may have any one or more of the following sensorial and/or organoleptic qualities attributed by novel strain, variant or derivative according to the invention: improved mouthfeel, rounded taste, bland taste, mild taste, strong or intense taste, piquant taste, tangy taste, fruity taste, aromatic flavour, earthy flavour, strong aroma, medium aroma, mild aroma.

[0085] According to an eight aspect of the present invention, there is provided a method of producing strains of Penicillium by sexual reproduction, comprising the steps of:
[0086] 1. crossing complementary MAT1-1 and MAT1-2 strains of Penicillium;
[0087] 2. inoculating the isolates onto an agar medium;
[0088] 3. incubating the inoculated media plates at a temperature of between 10-20° C.; and
[0089] 4. obtaining ascospores.

[0090] Step one of the method involves obtaining isolates of complementary MAT1-1 and MAT1-2 mating types and crossing the same (one isolate expresses MAT1-1 and the other expresses MAT1-2 genes). The mating type of Penicillium isolates can be readily determined by using a polymerase chain reaction (PCR)-based DNA diagnostic test.

[0091] Penicillium strains useful in the method of the invention may be any suitable complementary mating type. For example, the strains of Penicillium used may be selected from Penicillium roqueforti, Penicillium paneum, Penicillium glaucum and Penicillium camemberti. In a particular embodiment, the strains of Penicillium used may be selected from Penicillium roqueforti and/or Penicillium paneum.

[0092] The second step of the method involves inoculating the isolates. Any suitable agar medium may be used, for example, an oatmeal agar medium. Preferably, the isolates are inoculated between about 1 to about 3 cm apart, suitably in such a way as to result in the fungal hyphae growing towards each other to form a barrage (as discussed in O'Gorman et al., (2009) Nature 457: 471-474).

[0093] Step three of the method involves incubating, for example, at between about 10 to about 20° C. in the dark for a period between about 3 to about 24 weeks, optionally between about 3 to about 12 weeks or between about 3 to about 6 weeks. The incubation temperature of between 10-20° C. advantageously increased the chance of mating compared to conventional methods. Preferably, the incubation takes place at a temperature of between 10-20° C., optionally between 10-15° C. or between 15-20° C. Over the course of this time, the formation of sexual structures known as cleistothecia can be observed. These are normally in the barrage zones, although they can be more widespread on the growth plates.

[0094] The final step of the method involves obtaining ascospores from the cleistothecia, for example through dissection. Ascospores represent the novel sexual offspring strains, which can in turn be used to establish new fungal colonies.

[0095] A ninth aspect of the invention relates to ascospores obtainable (or obtained) by a method according to the eight aspect of the invention. The invention also relates to a strain of Penicillium obtainable (or obtained) by any method of the invention.

[0096] According to a tenth aspect of the present invention, there is provided a method of screening for strains having flavour profiles comparable to strains B20, A22, 5A, 12A or variants or derivatives thereof:
[0097] a. carrying out GC-MS analysis of strains B20, A22, 5A or 12A, variants or derivatives thereof as defined herein;
[0098] b. carrying out GC-MS analysis of one or more query strains;
[0099] c. selecting those strains in (b) which group together with strains B20, A22, 5A or 12A, variants or derivatives thereof as shown in the GC-MS readings, as may be further analysed by principal component analysis or the like.

[0100] The skilled man will appreciate that all preferred features and aspects of any aspect of the invention can be applied to all aspects of the invention.

[0101] Throughout the description and claims of this specification, the words “comprise” and “contain” and variations of the words, for example “comprising” and “comprises”, mean “including but not limited to”, and do not exclude other components, integers or steps. Moreover the singular encompasses the plural unless the context otherwise requires: in particular, where the indefinite article is used, the specification is to be understood as contemplating plurality as well as singularity, unless the context requires otherwise.

[0102] Preferred features of each aspect of the invention may be as described in connection with any of the other aspects. Within the scope of this application it is expressly intended that the various aspects, embodiments, examples and alternatives set out in the preceding paragraphs, in the claims and/or in the following description and drawings, and in particular the individual features thereof, may be taken independently or in any combination. That is, all embodiments and/or features of any embodiment can be combined in any way and/or combination, unless such features are incompatible.

### BRIEF DESCRIPTION OF THE DRAWINGS

[0103] One or more embodiments of the invention will now be described, by way of example only, with reference to the accompanying drawings, in which:

[0104] FIG. 1 illustrates the positioning of aliquots of fungal spore suspensions on 9 cm Petri dishes of oatmeal agar (1=isolate of MAT1-1 genotype; 2=isolate of MAT1-2 genotype).

[0105] FIG. 2 illustrates the presence of sexual reproductive structures in P. roqueforti. (a-d) Paired cultures of 74-88×74-92 on oatmeal agar with yellow cleistothecia (arrowed) produced along the barrage zones following four weeks incubation at 10° C. Scale bar, 300 μm.

[0106] FIG. 3 provides evidence for meiotic recombination in P. roqueforti. Segregation patterns of a RAPD-PCR amplicon parental isolates (P1, P2) and 12 ascospore progeny (1-12) from the cross 74-92 (P1)×74-88 (P2), using primer OPW10 MM, molecular weight marker; C, water control; kb, kilobase. Arrow indicates the diagnostic RAPD band. Lane headings: MAT1-1 (red) and MAT1-2 (green) genotypes.

[0107] FIG. 4 shows a principle component analysis to illustrate that the sexual offspring from a P. roqueforti cross (labelled 1-30) show production of combinations of flavour volatiles which differ from those of the parental strains (Parent 5 and Parent 18) derived from Gorgonzola and Roquefort cheeses.

[0108] FIG. 5 shows a principle component analysis to illustrate that the sexual offspring from a P. roqueforti cross (labelled E-O) show production of combinations of metabolites including mycotoxins which differ from those of the parental strains (labelled A and B).

[0109] FIG. 6 shows results of a real-time PCR assay to study induction of protease genes when P. roqueforti cultures of both parental isolates (labelled 88 and 92) and sexual offspring (labelled 118-127) were transferred to a milk casein inducing medium.

[0110] FIG. 7 illustrates a dose response ‘kill curve’ when spores of P. roqueforti strain 74-88 were exposed to a UV radiation source for between 0-150 seconds.

[0111] FIG. 8 illustrates some of the colour mutant strains of P. roqueforti produced after UV mutagenesis, including light brown, reddish-brown, green and intense blue colour sporulating mutants.

[0112] FIG. 9 shows the pigment development pathway of Aspergillus and Penicillium (taken from Krijgsheld et al., 2013).

[0113] FIG. 10 shows GC-MS “electronic nose” results for 5A, 12A, A22, B20.

[0114] FIG. 11 shows the lipolytic activity of the novel strains A22, B20, 5A and 12A.

[0115] FIG. 12 shows the proteolytic activity of the novel strains A22, B20, 5A and 12A.

[0116] FIG. 13 shows the growth rate of the novel strains A22, B20, 5A and 12A.

### DETAILED DESCRIPTION

### Sexual Crossing in Penicillium

[0117] Penicillium roqueforti

[0118] A worldwide strain collection of over 100 P. roqueforti isolates was established from various sources including cheese (for example blue cheeses), cheese ripening cultures, tortillas, bread, hay silage, contaminated foodstuffs and cooking oil, and samples from this collection were used in this study.

### Routine Culture Growth and Maintenance

[0119] Cultures of P. roqueforti were grown according to routine methods on potato dextrose agar (PDA—39 g potato dextrose agar power (Oxoid, UK) made up to 1 L with distilled water) or malt extract agar (MEA—20 g Malt Extract powder (Sigma, UK), 1 g Peptone (Oxoid, UK), 20 g Agar (Oxoid, UK) made up to 1 L with distilled water) on 9 cm Petri plates or as slope cultures in Universal tubes, using a swab to transfer mycelia from a pre-existing culture for inoculum as appropriate. Cultures were grown in the light for one week at 28° C., then sealed with Nescofilm and stored at 4° C. Long term stocks were also established under liquid nitrogen or as silica gel stock at 4° C.

### DNA Extraction

[0120] For extraction of genomic DNA from Penicillium species, mycelium was produced from liquid cultures. A spore solution was prepared by adding 1.5 ml 0.05% (v/v) tween 80 to a slope of a culture, which was agitated with a swab and recovered. The spore solution was then added directly to 250 ml conical flasks containing 50 ml of yeast extract glucose liquid growth medium (YEG: 8 g yeast extract, 40 g glucose/per litre). Cultures were grown at 28° C. on a rotary shaker at 150 rpm for 5 days. The resulting mycelium was collected by filtration through a double layer of Miracloth (Calbiochem, USA) and rinsed thoroughly with 0.1M potassium phosphate buffer (pH 7.0). The harvested mycelium was freeze-dried and stored at −80° C. until DNA extraction was performed. DNA was extracted using a DNeasy Plant Mini kit (Qiagen Ltd, UK) in accordance with the manufacturer's instructions. Concentrations of DNA were estimated by comparisons with lambda DNA quantity markers (Promega, USA) on 0.8% agarose gels (SeaKem® LE Agarose, Lonza Group Ltd, USA).

Screening of P. roqueforti for Mating-Type Genes

[0121] A multiplex PCR diagnostic test was employed to amplify mating-type genes and therefore determine the mating type of individual isolates. DNA was obtained from four isolates of P. roqueforti (74-9, 74-10, 74-41, and 74-42) which had previously been confirmed to be P. roqueforti, based on sequencing of the b-tubulin gene.

Sexual Assay of P. roqueforti

### Sexual Crosses

[0122] Various crosses were set up to study the potential for sexual reproduction of P. roqueforti. Six isolates of P. roqueforti used in cheese production comprising one MAT1-1 strains and five MAT1-2 strains were crossed in all possible pair wise combinations (n=5). In addition, crosses were set up between four isolates from field sources comprising two MAT1-1 and two MAT1-2 strains.

[0123] Spore suspensions of each isolate (5×10⁵ conidia ml⁻¹) were prepared as follows. Conidia were collected from two month old cultures grown at room temperature on slopes of MEA or PDA. A sterile 10 μl inoculating loop (Greiner) was gently rubbed across the surface of the sporulating colony on the slope. One loop full of conidia was transferred to 5 ml of a 0.05% (v/v) tween 80 solution containing 0.05% agar. The purpose of addition of the agar was to increase the viscosity of the medium in order to prevent the formation of stray colonies during subsequent inoculation. The resulting suspension was homogenized by using a vortex mixer and quantified using a Haemocytometer to estimate spore density and diluted to a target concentration of approximately 5×10⁵ conidia ml⁻¹. The spore suspension was then used immediately to avoid any change in viability due to storage.

[0124] 1 μl aliquots of each spore suspension was separately inoculated on to an oatmeal agar surface (Robert et al. 2007. CBS Yeasts Database, The Netherlands, Centraalbureau voor Schimmelcultures, Utrecht) ca. 4 cm apart and perpendicular to aliquots of conidia of the opposite mating type (O'Gorman et al 2009; Nature, 457, 471-4). This arrangement created four interaction or ‘barrage’ zones as colonies grew (FIG. 1). Petri dishes were sealed with one layer of Parafilm, incubated inverted in continuous darkness at 10° C. or 20° C., and examined periodically for cleistothecia over different lengths of time according to the particular experimental cross.

### Preparation of Single Ascospore Cultures

[0125] Mature cleistothecia from P. roqueforti cross 74-88×78-92 were removed and cleaned by rolling on agar and an ascospore suspension prepared by crushing of the cleistothecia.

[0126] More specifically, ascospore suspensions were prepared according to O'Gorman et al Nature, 457, 471-4. Mature cleistothecia were picked off from surrounding hyphae using a flame sterilised needle, observed under a Nikon-SMZ-2B dissecting microscope, taking care to avoid conidia where possible. 5-10 cleistothecia were transferred to a 4% (w/v) water agar plate and gently rolled across the agar surface using a sterilised needle tip to remove any adhering conidia, taking care to keep the cleistothecium intact. Next, 20-50 μl of pH 6 sterile Tween 80 (BDH)(0.05%) was pipetted into a sterile 1.5 ml Eppendorf tube and cleistothecia ruptured against the side of the tube in this small droplet, releasing a macerate of peridium, asci, ascospores and contaminating conidia. This was made up to a final volume of 500 μl in pH 6 sterile Tween 80 (0.05%) washing the cleistothecia contents from the side of the tube with final vortex-mixing for 1 min to release the ascospores. The concentration of the resulting ascospore suspension was determined using a haemocytometer and were diluted as appropriate.

[0127] Where appropriate, to inactivate any contaminating conidia, the suspension was then heat treated for different periods of time and at different temperatures to kill any remaining conidia whilst at the same time retaining viable ascospores e.g. heat treatment at 69° C. for 10 min (NB. in some species the ascospores and conidia were killed at the same temperature so this was not possible).

[0128] To isolate individual ascospores, 100 μl of a 5×10⁵ ascospore ml⁻¹ suspension (either with or without heat treatment) was spread inoculated on three defined areas of an ACM plate. Triplicate plates were prepared and incubated at 37° C. for 14 h. Single-spore cultures were established on ACM by transferring individual germinating ascospores with a LaRue lens cutter attached to a Nikon-Optiphot microscope or by picking up individual germinating ascospores with a flame sterilised platinum wire.

### Evidence of Recombination

[0129] The possible occurrence of recombination in the ascospore offspring of a sexual reproduction between P. roqueforti was assessed by examining the segregation of RAPD-PCR markers and the mating-type genotype in progeny. An initial screening of nine RAPD primers revealed five primers that were suitable for genotyping of P. roqueforti (OPAX16, UBC90, OPW10, OPAJ05, OPA11).

Results of Sexual Crosses in Penicillium roqueforti

[0130] The availability of the PCR-based MAT diagnostic tests allowed directed crosses to be set up between P. roqueforti isolates of known MAT1-1 or MAT1-2 identity. Results of crossing efforts are described below.

### Production of Cleistothecia

[0131] Crosses were set up involving five P. roqueforti isolates used in cheese manufacture, comprising one MAT1-1 isolate (74-88) crossed in all combinations to four MAT1-2 isolates (74-89, 74-90, 74-91 and 74-92) (Table 2). Crosses were incubated at 10° C., 15° C., and 20° C. to assess any capacity to undergo teleomorph stage development. Significantly, after four weeks incubation at all three temperatures, cleistothecia were observed and all were found to contain ascospores when squashed. Similar number of cleistothecia was produced at all three temperatures, however slightly higher numbers were apparent at 10° C. (Table 2). The crosses were then re-incubated for a further month and re-examined for the presence of cleistothecia. However, the longer incubation period yielded no apparent increase in the number of cleistothecia. The pairing of 74-88×78-90 produced the highest number of cleistothecia at all temperatures, and was very consistent with the formation of over 1,000 cleistothecia per plate (Table 2). Developing cleistothecia were initially white and soft when young, and then matured becoming pale orange-brown to bright yellow after 1-2 months of incubation. The cleistothecia formed along the barrage zones between isolates of opposite mating type (FIG. 2(a-d)).

[0132] Cleistothecia were also formed in some crosses between the four P. roqueforti isolates from field sources (Table 3).

TABLE 2
Number of cleistothecia produced by P. roqueforti crosses on oatmeal
agar medium at 10° C. in the dark after one month.

| | | Number of cleistothecia | | | |
|---|---|---|---|---|---|
| | | MAT1-2 | | | |
| Crosses | | 74-89 | 74-90 | 74-91 | 74-92 |
| MAT1-1 | 74-88 | > | >> | > | > |

Ratings indicate the mean number of cleistothecia produced from three replicate crosses on oatmeal agar in 9 cm diameter Petri dishes after incubating in the dark for 1 month at 10° C.: >more than 100 cleistothecia, >>more than 1,000 cleistothecia.

TABLE 3
Number of cleistothecia produced by P. roqueforti crosses
on oatmeal agar medium at 10° C. in the dark after one month.

| | | Number of cleistothecia |
|---|---|---|
| | | MAT1-2 |
| Crosses | | 74-4 |
| MAT1-1 | 74-84 | > |
| MAT1-1 | 74-86 | > |

Ratings indicate the mean number of cleistothecia produced from three replicate crosses on oatmeal agar in 9 cm diameter Petri dishes after incubating in the dark for 1 month at 10° C.: >more than 100 cleistothecia but less than 1,000.

### Evidence of Recombination

[0133] A recombination analysis of the ascospore offspring using molecular markers was conducted to confirm that meiosis had taken place. It was found that a heat shock of 70° C. for 10 min was sufficient to break the ascospore dormancy and activate germination, whilst killing any contaminating conidia. Distinct segregation patterns were clearly observed when six RAPD markers and the MAT genotype were scored in 12 ascospore progeny (FIG. 3 and Table 4). Unique genotypes were found in 83% of the progeny, with only two of the offspring identical to its parent (based on the markers examined (Table 4)). These results provide convincing data that P. roqueforti exhibits a heterothallic sexual breeding system.

TABLE 4
Genotypes^{a} in the parental isolates and 12 ascospore progeny
of a cross between P. roqueforti isolates 74-88 × 74-92

| | Mating | RAPD band^{b} | | | | | |
|---|---|---|---|---|---|---|---|
| Isolate | type | OPAJ05 | UBC 90 | OPAX 16 | OPW 10 | OPA 11 | Genotype^{c} |
| 74-88 | MAT1-1 | − | + | − | − | + | P1 |
| 74-92 | MAT1-2 | + | − | + | + | − | P2 |
| 88-92-1 | MAT1-1 | + | + | − | + | + | A |
| 88-92-2 | MAT1-2 | + | − | − | − | − | B |
| 88-92-3 | MAT1-2 | − | − | − | − | − | C |
| 88-92-4 | MAT1-2 | − | + | − | − | − | D |
| 88-92-5 | MAT1-2 | + | − | − | + | − | E |
| 88-92-6 | MAT1-1 | + | − | + | − | − | F |
| 88-92-7 | MAT1-1 | + | + | + | − | − | G |
| 88-92-8 | MAT1-1 | − | + | + | − | − | H |
| 88-92-9 | MAT1-2 | + | + | − | − | − | I |
| 88-92-11 | MAT1-1 | − | − | − | − | − | C |
| 88-92-13 | MAT1-2 | − | + | + | − | + | K |
| 88-92-18 | MAT1-1 | − | + | − | + | − | L |

| | | | | | |
|---|---|---|---|---|---|
| P- value(2- tailed)^{d} | 1.00 | 1.00 | 1.00 | 0.545 | 1.00 |

| | |
|---|---|
| Contingency χ^{ef} | 0.454(1) |

^{a}Genotypic characterization mating- type and RAPD-PCR bands.
^{b}RAPD-PCR bands amplified using operon primers OMT1 or R108. ‘+’ and ‘−’ denotes presence or absence, respectively, of particular amplicon.
^{c}The genotype of each progeny isolate, defined by unique combinations of mating-type and RAPD markers as distinct from the parental isolates (designated P1 and P2), is identified by a different letter of the alphabet
^{d}Fisher's exact test for deviation from the null hypothesis of independent assortment of mating-type and RAPD markers in the progeny (i.e. a 1:1:1:MAT1-1+:MAT1-1−:MATt1-2+:MAT1-2− ratio for each RAPD marker). Fisher's exact test was used instead of the χ² test because the expected frequencies were <5
^{e}To test for deviation from the null hypothesis of independent assortment of mating-type and RAPD markers in the progeny (i.e. an overall 1:1:1:1 MAT1-1+:MAT1-1−:MAT1-2+:MAT1-2−ratio for the sum of the RAPD markers).
^{f}Number in parenthesis indicates the degree of freedom.

[0134] The data above clearly demonstrates the ability of Penicillium roqueforti, used in the production of blue-veined cheeses, e.g. Roquefort, Danish blue, and Gorgonzola (Nichol, 2000) to sexually reproduce and produce progeny strains with different genotypes to either parent.

### Production of Cleistothecia

[0135] Crosses were set up involving five P. roqueforti isolates used in cheese manufacture, comprising one MAT1-1 isolate (74-88) crossed in all combinations to four MAT1-2 isolates (74-89, 74-90, 74-91 and 74-92) (Table 5). Crosses were incubated at 10° C., 15° C., and 20° C. to assess any capacity to undergo teleomorph stage development. Significantly, after four weeks incubation at all three temperatures, cleistothecia were observed and all were found to contain ascospores when squashed. Similar number of cleistothecia was produced at all three temperatures, however slightly higher numbers were apparent at 10° C. (Table 5). The crosses were then re-incubated for a further month and re-examined for the presence of cleistothecia. However, the longer incubation period yielded no apparent increase in the number of cleistothecia. The pairing of 74-88×78-90 produced the highest number of cleistothecia at all temperatures, and was very consistent with the formation of over 1,000 cleistothecia per plate (Table 5). Developing cleistothecia were initially white and soft when young, and then matured becoming pale orange-brown to bright yellow after 1-2 months of incubation. The cleistothecia formed along the barrage zones between isolates of opposite mating type (FIG. 2(a-d)).

[0136] Cleistothecia were also formed in some crosses between the four P. roqueforti isolates from field sources (Table 6). However, isolate 74-64 (MAT1-2) failed to form cleistothecia in any of the attempted crosses.

TABLE 5
Number of cleistothecia produced by P. roqueforti crosses on
oatmeal agar medium at 10° C. in the dark after one month.

| | | Number of cleistothecia | | | |
|---|---|---|---|---|---|
| | | MAT1-2 | | | |
| Crosses | | 74-89 | 74-90 | 74-91 | 74-92 |
| MAT1-1 | 74-88 | > | >> | > | > |

Ratings indicate the mean number of cleistothecia produced from three replicate crosses on oatmeal agar in 9 cm diameter Petri dishes after incubating in the dark for 1 month at 10° C.: >more than 100 cleistothecia, >>more than 1,000 cleistothecia.

TABLE 6
Number of cleistothecia produced by P. roqueforti crosses on
oatmeal agar medium at 10° C. in the dark after one month.

| | | Number of cleistothecia | |
|---|---|---|---|
| | | MAT1-2 | |
| Crosses | | 74-4 | 74-34 |
| MAT1-1 | 74-84 | > | — |
| MAT1-1 | 74-86 | > | — |

Ratings indicate the mean number of cleistothecia produced from three replicate crosses on oatmeal agar in 9 cm diameter Petri dishes after incubating in the dark for 1 month at 10 ° C.: —none, >more than 100 cleistothecia but less than 1,000.

### Proteolytic Activity, Lipolytic Activity and Growth Rate

[0137] Table 7 below and FIGS. 11, 12 and 13 show the proteolytic activity, lipolytic activity and growth rate for the novel strains A22, B20, 5A and 12A. “Low” defined as below 25% percentile. “Med/Low” up to median. “Med/high” up to 75% percentile. “High” above 75% percentile. Penicillium roqueforti strains 74-88, P2, A7 and F11 may be found at the Nottingham University BDUN Collection.

TABLE 7
Proteolytic activity,
Lipolytic activity and Growth Rate of various strains

| | Proteolytic | Lipolytic | |
|---|---|---|---|
| Isolate | Activity | Activity | Growth Rate |
| 74-88 | Med/High | Med/High | Med/Low |
| P2 | Med/High | High | High |
| A7 | Low | Low | Low |
| A22 | High | Med/High | Med |
| B20 | Med/Low | Med/Low | Low |
| 5A | Med/High | Low | High |
| 12A | Low | Med/Low | Med/High |
| F11 | Med/Low | Med/High | Med/Low |

### Phenotypic Variations in the Properties of Penicillium Strains Produced by Sexual Crossing

### Differences in Flavour Properties

[0138] For example, a cross was set up between strains of Penicillium roqueforti derived from Roquefort and Gorgonzola type-blue cheeses. Thirty sexual progeny were recovered from this cross. The GC-MS technique was then used to determine levels of production of 16 volatiles linked to flavour production in an artificial cheese system based on growth in UHT milk in laboratory shake culture. Data for individual flavour volatiles were then pooled using principal component analysis (FIG. 4). This revealed that the parents (labelled Parent 5 and Parent 18 in bold font) occupied certain flavour spaces corresponding to the relative production of a variety of flavour volatiles. By contrast, the majority of the sexual offspring (labelled 1 to 30) occupied different flavour spaces on the principal component analysis, with some isolates (e.g. 2, 4, 9, 3, 18, 21) exhibiting quite different volatile flavour production from the parents, while others (e.g. 28, 8, 1) exhibited intermediate volatile flavour production between the two parents (FIG. 4). Thus, there is evidence of the production of different relative levels of flavour volatiles in the sexual offspring, likely to correlate with different flavour properties in cheese.

### Differences in Mycotoxin Production

[0139] For example, a cross was set up between two blue cheese production strains of Penicillium roqueforti (A and B) and sexual progeny (E-O) were recovered from this cross. The HPLC technique was then used to determine levels of production of over 25 metabolites including known mycotoxins from representative offspring when grown in laboratory liquid culture media. Data for individual metabolites and mycotoxins were then pooled using principal component analysis (PCA) (FIG. 5). This revealed that the parents (labelled A and B in blue font) occupied certain areas of the PCA spaces corresponding to the relative production of the variety of metabolites including mycotoxins. The majority of the sexual offspring (also labelled in blue) exhibited intermediate metabolite and mycotoxin production between the two parents (e.g. K, O, M). However, some offspring showed quite different levels of metabolite including mycotoxin production (e.g. G, J, L). Thus, there is evidence of the production of different relative levels of metabolites including mycotoxins in the sexual offspring, offering the opportunity to select for offspring with lowered levels of mycotoxin production.

### Differences in Protease Profile

[0140] A cross was set up between two blue cheese production strains of Penicillium roqueforti (88 and 92) and six sexual progeny (118, 119, 121, 124, 126 and 127) were recovered from this cross. Both the parental isolates and the sexual offspring were then first grown on a non-milk based nutrient agar. They were then transferred to media containing milk protein (casein) and levels of induction of protease enzymes were determined using real-time PCR methodology, measuring induction of protease genes (FIG. 6). This analysis revealed differences in the protease profiles of the parental isolates (88 and 92), and that the sexual progeny exhibited levels of protease production which differed considerably from parent 88, but which were mostly similar to parent 92 although there were some more intermediate values (118) and some offspring showed protease production lower than either parent (119, 124) (FIG. 6). This small sample indicates that differences in protease production will be present in the sexual offspring relative to the parents, offering the opportunity to select for offspring with desirable levels of protease production.

### Mutagenesis of Penicillium Strains to Produce Different Coloured Spores

[0141] To produce mutants of Penicillium roqueforti by UV mutagenesis, a UV cabinet was switched on and allowed to warm up for 30 minutes (this also helps sterilize the UV box). A dose response curve was then performed to determine a suitable time to expose fungal material to result in a suitable decrease in viability. Fungal spores were produced on PDA and spore suspensions were made in sterile water aseptically and diluted to a concentration of 200,000 spores/ml, and cooled in a fridge for at least an hour. Spores were then transferred to a sterile 5 cm Petri dish and were continuously mixed using a sterilized magnetic stirrer in a 10 ml volume of spore suspension. The spores were then exposed to the UV radiation source at a certain distance from the lamp (standard between 30-40 cm below lamp) and aliquots of the spore suspension removed at suitable intervals (for example, between 30 seconds to 10 minutes) and stored in a fridge for 1 hour, using 3 technical replicates per time point. Spores were then transferred to 12 cm square plates containing PDA and then surviving spore numbers counted approximately 30 to 36 hours later.

[0142] In the case of P. roqueforti strain 74-88, it was found that a suitable 5-10% survival rate resulted after exposure of spores for 60-90 seconds (FIG. 7). The resulting germinating fungal colonies that were exposed to UV radiation for 60-90 seconds were allowed to grow and sporulate. At this point mutants showing differences in colour from the wild type were then selected, such as light brown, reddish-brown, pink, green and intense blue mutants (FIG. 8).

### Production of a Blue Cheese Using a Penicillium Strain of the Invention.

[0143] In small-scale production trials, approximately 40 litres of whole, pasteurised milk was placed in hard plastic buckets. Milk was added at just over 34° C. to allow for the small volumes and the culture room was held at around 24° C. A mixed mesophilic starter culture from Christian Hansen and a gas giver, leuconostoc, from Danisco were added together with 5 ml of calcium chloride per bucket. Chymax rennet from Christian Hansen, 10 ml per bucket, diluted with 4 parts water was also added. The buckets were incubated, resulting in curd and whey formation. The curds were cut using an 11 mm square cutter and removed with a colander, then during moulding and turning further whey was removed by gravity, resulting in cheese wheels of perhaps 2.8-3 kg in size. The cheese was then turned a number of further times over 3-4 days. After one further day firming up is performed at around 16° C. followed by first and second salting in successive days then ripening at 12° C. Cheeses are then pierced during week 2 and by week 3 mould development should be apparent. Cheeses are then allowed to ripen for a suitable time between 2 and 3 months.

1. A method of producing strains of Penicillium by sexual reproduction comprising:
a. crossing complementary strains of Penicillium of mating type MAT1-1 and MAT1-2;
b. inoculating the isolates onto an agar medium;
c. incubating the inoculated isolates at a temperature of between about 10-20° C.; and
d. obtaining ascospores.

2. Method according to claim 1, further comprising the step of obtaining progeny strains from said ascospores.

3. Method according to claim 1 or 2, wherein said mating type strains are selected from any of Penicillium roqueforti strains 74-130; 74-144; 74-133; 74-146; strain Penicillium roqueforti 5A (74-256) deposited under the Budapest Treaty as CBS 145358, referred to herein as “5A”; strain Penicillium roqueforti 12A (74-257) deposited under the Budapest Treaty as CBS 145359, referred to herein as “12A”; strain Penicillium roqueforti A22 (74-160) deposited under the Budapest Treaty as CBS 145360, referred to herein as “A22”; strain Penicillium roqueforti B20 (74-170) deposited under the Budapest Treaty as CBS 145361, referred to herein as “B20”; a strain obtainable by sexually crossing strains of Penicillium roqueforti 74-130 and 74-144 and having similar characteristics to A22; a strain obtainable by sexually crossing strains of Penicillium roqueforti 74-133 and 74-146 and having similar characteristics to B20; variant strains having at least 99% sequence identity to any of the aforementioned strains.

4. Method according to claim 3, wherein strain 74-130 is sexually crossed with strain 74-144 and optionally produces strain A22 or a strain having similar characteristics to A22.

5. Method according to claim 3, wherein strain 74-133 is sexually crossed with strain 74-146 and optionally produces strain B20 or a strain having similar characteristics to B20.

6. Method according to any preceding claim, wherein said Penicillium is Penicillium roqueforti, Penicillium paneum, Penicillium glaucum or Penicillium camemberti.

7. Ascospores obtainable by a method according to any preceding claim and progeny strains obtainable from said ascospores.

8. A strain of Penicillium selected from:
a. strain Penicillium roqueforti 5A (74-256) deposited under the Budapest Treaty as CBS 145358, referred to herein as “5A”;
b. strain Penicillium roqueforti 12A (74-257) deposited under the Budapest Treaty as CBS 145359, referred to herein as “12A”;
c. strain Penicillium roqueforti A22 (74-160) deposited under the Budapest Treaty as CBS 145360, referred to herein as “A22”;
d. strain Penicillium roqueforti B20 (74-170) deposited under the Budapest Treaty as CBS 145361, referred to herein as “B20”;
e. a strain obtainable by sexually crossing strains of Penicillium roqueforti 74-130 and 74-144 and having similar characteristics to A22;
f. a strain obtainable by sexually crossing strains of Penicillium roqueforti 74-133 and 74-146 and having similar characteristics to B20;
g. variant strains having at least 99% sequence identity to the genome sequence of any of the strains defined in (a) to (f).

9. A derivative of a Penicillium strain having an altered pigment development pathway and capable of producing spores of a different colour from corresponding strains having an unaltered pigment development pathway.

10. A derivative strain according to claim 9, wherein said derivative is a derivative of ascospores or progeny strains according to claim 7 or a derivative of a strain according to claim 8.

11. A derivative strain according to claim 9 or 10, wherein the spores are any one or more of the following colours: light olive brown, light brown, olive brown, brown, reddish, reddish-brown, reddish-brown-pink, intense blue to light blue, green and albino.

12. A derivative strain according to any one of claims 9 to 11 having altered (increased or decreased or substantially eliminated) expression of one or more of the following metabolites: heptaketide naphthopyrone; 1,3,6,8-tetrahydroxynaphthalene; scytalone; 1,3,8-trihydroxynaphthalene; vermelone; 1,8-dihydroxynaphthalene, or metabolites produced as a result of the action of genes Alb1, Ayg1, Arp2, Arp1, Abr1, Abr2 from Penicillium species.

13. A derivative strain according to any of claims 9 to 12, wherein said pigment development pathway is altered by any one or more of: U.V., X-ray or chemical mutagenesis, gene editing, gene transformation, for example, to overexpress or downregulate one or more of the following genes: Alb1, Ayg1, Arp2, Arp1, Abr1, Abr2.

14. A strain according to claim 8, or a strain derived from ascospores according to claim 7, or a derivative according to any of claims 9 to 13, having altered protease and/or lipase levels and/or activity and/or altered levels of metabolites relative to either one or both parental strains used in the sexual cross, or relative to known strains used in the manufacture of dairy products.

15. A strain according to claim 8, or a strain derived from ascospores according to claim 7, or a derivative according to any of claims 9 to 13, when used in the production of a food product, produce food products having an altered organoleptic profile relative to either one or both parental strains used in the sexual cross, or relative to known strains used in the manufacture of dairy products.

16. A method for altering the colour of fungal spores, optionally spores of a Penicillium strain, comprising altering the pigment development pathway.

17. Fungal spores obtainable by a method according to claim 16, wherein said spores differ in colour from corresponding strains having an unmodified pigment development pathway.

18. A composition comprising a strain according to claim 8, or ascospores or a strain derived from ascospores according to claim 7, or a derivative according to any of claims 9 to 13, or fungal spores according to claim 17, and an acceptable carrier, such as an agriculturally acceptable carrier, a carrier suitable for nutraceutical administration, a carrier suitable for use in food applications, a carrier suitable for bioremediation applications.

19. Composition according to claim 18, comprising at least one additional bacteria or fungus.

20. Use of a composition according to claim 18 in any one or more of the following: (i) the production of or in a foodstuff, (ii) production of a nutraceutical, (iii) bioremediation, (iv) enzyme productions, (v) fermentation process, e.g. in the production of biofuels, (vi) in the production of or in animal feed.

21. Use according to claim 20, wherein said foodstuff is a cheese starter culture, cheese or a cheese product, such as a cheese sauce, cheese spread, dried cheese ingredient.

22. A cheese comprising a composition according to claim 18, a strain according to claim 8, or ascospores or a strain derived from ascospores according to claim 7, or a derivative according to any of claims 9 to 13, or fungal spores according to claim 17.

23. A cheese according to claim 22 which is a hard cheese or a soft cheese, a blue cheese, whether ripened by a Penicillium internal or external mould, optionally wherein the cheese is a Roquefort, Bleu de Bresse, Bleu du Vercors-Sassenage, Brebiblu, Cabrales, Cambozola (Blue Brie), Cashel Blue, Danish blue, blue Cheddar, Fourme d′Ambert, Fourme de Montbrison, Lanark Blue, Maytag Blue, Strathdon Blue, Blue Murder, Shropshire Blue, Dorset blue vinney, Brighton blue, Moyden's Wrekin blue, picos blue, cabrales, rokpol, dolcelatte, and Stilton, and some varieties of Bleu d′Auvergne, a Gorgonzola, a Brie, a Camembert or any other cheese ripened by a Penicillium internal or external mould.

24. A method of screening for strains having flavour profiles comparable to the strains of any preceding claim, comprising the steps of:
a. carrying out GC-MS analysis of strains B20, A22, 5A or 12A, variants or derivatives thereof as defined in any preceding claim;
b. carrying out GC-MS analysis of one or more query strains;
c. selecting those strains in (b) which group together with strains B20, A22, 5A or 12A, variants or derivatives thereof as shown in the GC-MS readings.

25. Strains obtainable by a screening method according to claim 24.

The application's sequence listing, which the Patent Office published only in electronic form, follows.

SEQUENCE LISTING (198 sequences)

SEQ ID NO: 1 - DNA, 1691 bp, Penicillium roqueforti
atgctaactgcaggacaggtcaaccaaactggaacatactggtaccactcacacaacgcgggccagtaccccgatggattccgtggtgctctgattgtccacgaccctagccctcctttccactatgacgatgaattcacactcactctgagcgactggtaccacaaggagatgccggagctgctcggtacgatcactgcggcctcccatggccaagagcccctccctgacgcggcattgatcaacgactcaaccaacaccaagatcaaggttttgcccaacaagacgtatctggttcacatcatctgcgttggaaactggcccggccacttctgggtgttcgatggccatgagatgactgtcgtggaggtcgacggcgtctataccgagccctaccctgctggagacaagttcctgcgcgttgcgactggtcagcgaatgagtgtcttgattaaaaccaaacctgatgccagtcagaactttgctatttgggataccatggatgtcaacatgatgttcatcttcgaaaatcgtaccatcccggagaattacaaccccaatgctaccgcctggttggtgtacgacgatgccaagcccctacctccgcctcctgtcttcaataacattgacgccgcaacggactttgtggatgatgtcctattggtacctgccgaccatgagcccatcctgcagcccgtggaccaccagatcattttggataccgccgccggtctggtagacggtgttccgcgcttcactgtcaacggcaagacgtacatcgccccgaaggtgccatcgctctacactgccaacaccgtcggtcccgagttttcctccaatcccgatgtatacggccaagtaaaccccttcgtcgtgaagtacaacgaggtcgtcgaaatcatcatcaacaaccaccacaacaacctgcacccatggcacttgcacggtcaccaattccaggttctgcagcgtaccccagttgatggcggcttctacacgggtctatcgagcaacgtctccaacaccccgatcagacgcgacaccatcatggtccagaacaacggccacaccgtcatccgcttccgcgccgataacccaggtgtctggatgctccactgccacgtcgagtggcacgtcgagactggtctcatggccactatcatcgaggcccccgagaccttccagcacagcttgcacgctcccccgcagagccattacgacacctgcgctgcctaccctcaaggcgtcagcggaaatgctgctggtaaaaatggtcttgatctgactgggcttgacaccacacctcccaccaccaatcacggcgctctgtatactgccaccaagggcacaaatgctcccgctgaggcgaatcaacctcagggatcgtcccaagcatcggtgccgaagccatctcccagtgccaacacagatggttactggaaagtccctcacactgatgtctacgtcgagcaccccgacaaaccgcacgaccaccacatcactatccacgaggagtcgaccaagggcccgtggccaaaccagaatacctatagcggctatgttattaataacggtcacagctctcccatcaaagactctgagtgagtacattctaaaggcccaaatgtgctcatcaactaactcttttcagtgatgatgatatcctggctgagatcaaggattgggagtga

SEQ ID NO: 2 - DNA, 2010 bp, Penicillium roqueforti
atgacacacacgaagtccctgttcctgactttgatgggtgctgctgctctgagtcaggcagctaaagttcattatgatcttgacctcacatggaagaggggcgcaccgaacggagtcgagagggagatgatctttgtcaatgatcgttttccaggcccgccattgattctggatgaaggagatgaagtcacagtgggttgtcctgctttattttcaaagcgcatactgagagaaatagatagacgtgaccaacaatttgcccttcaatacatctgtccatttccacggcattgagtagggcctccggaaattcctcttcgattaccgcacaatactgaaccacaacaggcaaaccaacaccccatgggcggacggagtatcaggactatcgcaatgggccatcaagcccggtgacaaataccgataccattggaaagccacgacctatggtacttactggtaccatgcccacgacaaggacagaataatggatggtctctacggtggaattagaattcggtgagtatgcagcagcatgtatttattatgtctttaacaaggaatcagtccgtctgccgaccgagagtcaccattctcaatgatttctgatgaccctgccgatatccaggcaatgacaaaagccgcccatgatgcccagttggtcgtgatgtctgactgggaccatctttcgtccaatgaatacatggatgcactgaaagaaacaggctatgatatcttgtaaggacccaaatatgatagccaaagaagtaccgcactcacaatcaccagttgctcagatagcattctcatcgatggtgcaggctctgtatactgcaaagaccctgaatatttgacaaacctccaaccaccccaggtcagagcagtcataactgagcctttgacggataaggggtgagtctatactttactaggctgatttgaaagccactaacacttgccagatgcgatcccttcatgccagttctccaaggtaactgggagcaccacccagagctccttcccgagggattgaactccggatgtaagcccagtgagggtccaacgtcctcctttgaagtatcacccaaaaaccgatgggctagtttgaacttcatcagtgcagcaagtctcaaatcgttgatcttctccattgatgagcacccgatgtacatctacgaagtggatggacgctacattgagccccagcttgcgcatcaggtttccatttacagtggagagcgctactctgccatgatcaaactcgacaaggaacccggcagctacacgatccgtgtcgctggtcatgataaccaggtcatctctggctacgctaacctcgcctacaagggcggtgaacataacaagcgcgaatcaacggcatatatcgactacggcggcactaacactacagcctctgtgatcaatctgaacacaacgaacctgccgccatatcctgctatcctacctgcggaggacggcgatgatttccatctcctgacccttggacggatcaactcatcctgggaatggactttggatgggacgaccttcctcccagccaatttgaaccaaatggaaccagtgattctcaaccccaaagcaccgagcctggattctgccctgaagattgagacccggaatggcacctgggtcgatattgtgttccagctcgccatccccgacccaaccaagcttcagccaccccacccgatgcacaagcattccaacaaggcctttttgattggcagtgcaatgggcaagttccagtggggctctatcgcggaagcaaaagcaagcagcccggacagcttcttcaaaacccctgtgtatcgcgatacatttgtgactgcgccaaatggagtggcctggatcgctattcgctaccaagtcgtgaacccaggaccattccttttgcattgtcatatggagacgcacttctcgtcgggtatgggcatggtcttgctggatggtgtcgatgcttggcccgaagttcctcctcactacctatag

SEQ ID NO: 3 - DNA, 6652 bp, Penicillium roqueforti
atggagggccccagtcatttgtatctctttggagatcagactgcggattttgactccgggcttcgtcggctgttgcatgctaagaatgactcgcttgtagcagcattcttccaaaagtgctactatgcgttacgcaaggaaattacatcgcttccgccatccgaacgtcagggcttccctcgctttactagtatcgttgaccttctcgcgaggttcaaagagtcagggccgaacccagctctagagagtgcattgacaacaatttaccaactaggatgcttcatccagtaagaatattgccgccttgatgatatcgagatgagattttggaatcaaacttactgacaatgtcttatagctactatggtgatttgggccatgcctatccgtcgggtgatgacagctgcatcattggactttgcaccggtcaactcgcatctgcggccgtaagctcttcgaaaactatcggggagcttattgcagctggaattgagaccgtccttgtttccttgaggctcgggatgtgcgttttgaaagtacaagagctcatagaaccaagcaaatcggcaacatcaagctggtctgtactaatttctggtatgcacgagcccgaggcccaggatttgattcaacagtacacgaagaagaatgtaagtcttttcccccaaaccgacttgaaataaaagaggatcattgttaatattttcaaggccttgccccgcgtttctcaaccttatatcagcgcagtaagccccaatggactcacgatcagtggtcccccgacttttctgggccgtttcattgagtccagtctctcaaaggagcacaagcccacaatggttccaatccacggcccttatcatgcctctcatctatatgataacagggacattaaccgaattttggaatcgtggcctacagagaatttcatgatgtacgtgcctcagatccctgtgctgtcaagtgagacaggcaaggagctccaggctgagagccttgagcagctcttgagattttctcttcaggagattctacaaagacagctttgctggggcaaggtcatccaatcttgccagtcaatcttggagtctacaacaacatgcactctgttcccaatttccagcactgcaacccagagcctatttaactcattgaaaaaggctggagtctccaatctcgaggttgacagcacacttggtgatgtccggaaggatgctggtggagataatcgtaccggccgtgctgagcagtccaaaattgcaattattggtctttcaggaagatttccagattcgcctgataccgaagctttctgggatcttttgaaaaaaggactggacgtccaccgcgaggttcccccagagcgatgggatgtcaaggctcacgttgacatggaaggaaagaaaagaaataccagccaagtccaatatggatgctggtatgacgacgcgggcatgtttgaccctcgatttttcaatatgtctccccgtgaagcacttcaagcagatcctgctcaacgtctggcactcttgactgcttatgaggctttggaaatggcaggcttcatccctgacagcacgccctctacgcagaagaaccgagtgggtgtcttctatggaatgaccagtgatgactaccgtgagaccaacagtggtcaggatattgacacctactttatcccgggtggtaaccgtgcttttactcccggtcgcatcaactactatttcaagttcagcggccccagtgttagtgtggataccgcttgctcctcaagtcttgcggcaattcatgtcgcctgcaattccttgtggaggaatgaatgtgattctgccgtgacgggcggtgtcaacatcctggcaaatcccgacaatcatgctggtcttgatcgtggacacttcctctcaaggaccggaaactgtaccacctttgatgatggggctgatggctattgcagagcagatggagttggctccattgtcattaagagacttgaggatgcccaggcagacaacgatccaatctacggtattattggaggagcttataccaaccactcagcagaggctgtgtcaattactcggcctcatgtgggagcacagtccttcatcttcgacaagcttctcaacgagtccaacagcgacccaaaagagattagttatatcgaaatgcacggaaccggcacccaggcaggtgatgcagtggagatgcagtcggttctcgatgtcttcgctcctgactaccgtcgtgggccaacccaatctcttcacctcggttcagcaaagtcaaatgttggccatggagagtccgcctctggtgtcacagctctgatcaaggtcttgatgatgatgcgaaagaacatgattccccctcactgtggcatcaagaccaagatcaaccacaacttcccgacagacttcccgcagcgcaatgtgcacattgcatctgaagctgtcccctggaacaggccaaatggtggcaagcggaagactttcatcaacaatttctcggccgccggaggcaatactgctttgatggtcgaggatggtccgctcaatgacgagaatgtggaagatatccggtctgcgcatcctgtgcttgtttcggctcggtcccagtctgcactgaagaataacatctctgctctcgtgcagtacatcgatacaaacaagaactcgttcaattccaacgatgcaagcctccttgccaatctgtcttacacgactacagcgagacggattcatcatcccttcagagtcgctgtcactggatctactctagatgaagtcaggagtgcattggctcctatcgtcaaccgagacagcatcagcccggctcctgccaatgcacctggcatcggatttatcttcaccggacaaggtgctcagtacacaggcatgggacgccaattgtttgatagttgctcccaattccgtgctcacatcgaacacttgaattgtatctgtgagagccagggcttcccatctattctgtccctggtcgacgggagtgtgccaattgaagagcatagcccgatcgttacacagctcggaacaacctgtgtgcaaatggcattgacaaagtactggatgtctctgggtattgtacctacctttgtcattggccatagcctcggcgagtttgccgcgctgaatgcttccggtgtcttgacaactagcgacacaatctaccttgccgggcgacgagcccagcttctcactgaacaaatcgaggttggaacgcacgctatgcttgctgtcaagtcttcagtggcacaggtcaagcagtttcttgatgaggctaccgaggtggcttgtatcaatgcgcccagcgagactgttatcagtggcgcaagcgagaagattgacgagcttgcgcaaactcttaccaacgaagggttcaaggctaccaagttaaatgtaccttttgctttccattcagctcaggttgaacctatacttgaaagtctggctgaaattggaaagggcgtcaatttcaacgcgccctctattccattcgtatctgcccttcttggagacgtcatcaatgagaccaacggtgagttgcttggtaccaactacctcacccgtcactgccgggagactgtcaacttcctgggtgctcttgaagctacccggcactccaacttaatgaatgacaagactatttgggttgagattggctctcacccggtctgctccggaatggtcaaggcaactttcggtcctcaggcaactactgtggcatctctccgtcgccaggaagacacgtggaaggttctctcaaccagtgtttcagctctctatatggctggaattgacattcgatggaaggaatatcaccaggacttcactggacacaaagttctcccactcccttcctacaagtgggatctcaagaactactggattccttacactaataacttctgtctgctcaagggtgcaccgccggtatcagtggctgatgctgcgccagtttctgttttcttgtcatcggcagcacaaaaggttttggagacgagtggtgacaattcgtcggcgtctatcgtcatcgagaatgacattgctgatcccgacctcaatcgtgtcattgcaggtcacaaggtgaacggtgcctgccttactccatcggtatgcatattcttttctcatttaacagtcttgcttgctaattgatttttagtccctgtacgccgatatcgcccaaacacttggtgaatatctagtccagaactacaagccagaatggaaagatcgcggatttgatgtctgcaacatggtggtccctaagccgcttattgcaaagggaggcaagcagctcttccgcgtttcagcgactgcaaactgggccgaagaaaatgccaaggtgcaggtgtggtctgtgacccccgaggggaagaagatccttgaccacgccacttgctacatcaagttctttgatcccagtacttacgacgtcgagtggaagcgcagctcttacctcatcaagcgaagcattgagcatctccaagagagcactgtatccggccaggctcaccgcatgaagcgaggaatggtctacaagctctttgcttctctggttgattatgacgagaactacaaatccattcgggaagtcatcctcgacagtgaccaacacgaagctaccgctctggtcaaatttgaggctcctccgggcaactttcatcgcaatccattctggattgacagcattggtcacttgtctggcttcattatgaatgctagtgataacaccgattcgaagaaccaagtgttcgtcaatcatggatgggactcgatgaggtgcttgaagaagttcgatccgagcgtcacttaccgcacctacgtgaggatgcaaccctggaaagagtctatttgggctggtgatgtctatatgtttgatggagatgacatcgttgctgtgtttggtggtgttaaggtatgtcgaaaaaccgtcgtagtattctcgaatgaaacactaacagaatgcgacatagttccaagctctggcacgaaagatcctcgacatggctcttcctccagctggagcggcatccaagccggccgccaagcgtgttcctgctcccgtcaatatcgagaaggcaaagactggctctgccaaaaaggctgccccttcaccaagatctggaatgccaagtctgactatgcgtgctcttgcaatccttgctgaagaggtcggactttcggcatctgagctgactgatgacctcaacttcgctgattacggagttgactcccttctctcgctgactgtcactgggcgataccgcgaggacatgggactcgatcttgactccactatcttcgtggataatccaactgtcaaagacttcaaaaatcttctagctcaaatgagccctagtgaaagtagtgacggatcaagcagtgaaggtgacatgtcgtcggccgcatcttcgaccgacttgtcgagtccaaacagcagtggtctgccaagtcctgcaaatgagaagccgatggcacatggatcgcaggagcaaaatgacagcatgaggcagattgcctcaatcttggctgaggagatcggtgtggaacccgaggagctcgatggggatgcgaaccttgctgagatgggcctagactcattgatgtcgctcaccgttctcggtaaaatccgtgaagatcttgatcttgatctctcgggagagttcttcattgagaatcaaacactcgatgatatcgagactaccttgggtctaaagcctaagccagcccctgcggagccaatcagattccccgaacaaatccctgttcgagccccggtggtcgctcccagcactaccccccagcacccgccggccacttcaatcctcctgcaaggaaacccaaagacagcgactcagagtttgtttttgttccctgatggctctggctctgctacctcctatgcttccatccctggaatttctcccgatgtgtgtgtctatggattgaactgcccatacatgcgcacccctgagaatctcaaggccagattggacgagctcacagctccttacattgctgagattcggcgtcgccagcccactggcccttacaacttcggtggctggtccgccggtggtatttgtgcgtacgacgccgcgcgccaactgatcttcgaggaaggcgagcgagtcgagcgcctgctgcttcttgattcgcccttccccgttggactggagaagctgcctcgccgcctgtacagcttctttgatacggtcggactgtttggagagggcaaggcacctccacctaaatggcttctccctcacttcctggctttcatcgattccctggatgcttacaaggcggttcccttccctcacacagaccccaagctggccgataagctccccaagaccttcatggtctgggccaaggatggtgtctgctccaagccaggtgatgcccgccctgcaccagctgcagatggtagcccagaccctcgtgagatgctctggttgttgaacaaccgcactgatctcggtccaaatggttgggataccctcgtcggcccgaatcatgtcggcggaatcaccgttatggaggatgccaatcatttcactatgactcgtggcgagaaggccaaggagctggctacattcattgctaactctatggcttcggcgtaa

SEQ ID NO: 4 - DNA, 621 bp, Penicillium roqueforti
atgtctcctgccgtaaagaacatcaccgctgagcccaacttggacatcagcttccagggtatgtttcaatccaccctcattcacctgcttgtgctaacagcaacagactacctcatcctctcaaagctcgtcttcgactgggcggacagctacgatgccaaggtacacttccaatcgcattaaaagtcgaattcaacattaatcctgacactatcccaggactgggaccgcctgcgcagcattattgctccaactctgacggtggactacaccaagatcggtctgagaagatgggacaacatgtccgctgacgaatacatggccatgatcacccatcccggcttcctcggtgacaaaaccatcaagacccagcatctgcttggtcagacatggtgggagaagatctccgacaccgaggttattggtcaccaccagcttcgcgcggcgcaccaggtctacgaaaccgaagagttggagactgtcaagcttcgtggtcactctcatgctacgaatgagcactactatctcaagatcgatggtatctggaaatttgccgggttgaagccgaatgtgcgctttgatgagttacgctttgacgaggttttcaagggccttgactag

SEQ ID NO: 5 - DNA, 860 bp, Penicillium roqueforti
atggtcgttgcaaaccccaacgctgcccagcccgagctcgccggcaaagtcgccttagtgaccggcggtggtcgaggcatcggagccggcatcgcgctagagctagccaagaagggagcaagcgtagcgatcaactacgccagcagctcaaagaccgccgacgcagtggtacaagatatccaagcgcaaggtgtccacggcgccgcattccaagccgacctgacaaacgtcgactctatcgccaacctcttccgccaggtagtgtcccacttcggacagctggacattgttgtgtcgaacgccggaacggagaagttcgtgccgttgtccgagactacactggaggacttcaacgcagtgttcgacctcaacactcgggcgcagttcttcgtcgcgaagaatgcctacgactatatccagcccggcggacgtgtcgtgctgatgtcgtctattgccgcgggcctgggtgtgcccggccactcgctgtatgcgggcagcaagagcgctgtggagggctttactcgctgctttgctgctgactttggcaagaagagggctactgttaacgcgattgctcctgctggtgtcaagagtgatatgtggttgaccaacgcgtggcgctatgcgcctggctgtgaccagaactcgtctatcgaggatattgagacggcgcttgctaatggtagtccccttggacgctgtggtgtgcctgcggatattggccgcattgtggcattcttggccagtcctgctggagaatggatcaacggttagtactggaatgttaaattcacccctgggaatattgctaattatttgcaggtcaaattttgccttgtaacggtggagccaacatctaa

SEQ ID NO: 6 - DNA, 1453 bp, Penicillium roqueforti
atggtgaattggatcctcggagacaagttcgacactgtctaccctcatcagggatcgatcaaggtcctatgggagtcaaagtggaaattctgcgtatgtctcttcccaacaatcagaaaacacacaggaaactaacacggataattgaccaggccactaaatccatctacccattccacgatggatccgtggaagacttcgagcctattttccaaaagctgatcgctgtgagcatcgtcaaacatttgaatacaacccaaatccacgactaacaacaacaggataacatcaacgacgcaaacacagacgcctataccgaagccttcctcccaacagcaacagccctcgagaatgaagccgacacagccctcaacaacggccatctcgaccgcgccgcagacctgtaccgccgcgcagcagtcatcctccgcatctcgcgcttcccctacgtaagcccatcaacacgccccgagacatctgtcaagcgcgccgccttcgaccgtcagaagcaagtgtacctgaaagccgcctcactatggaaacccatcatcacggaggaagtgatttcacacacgcaccgcgcgggccgcgacggcgcctcgatcccgctgtacatccgggtgccggaggaagcgagccccaccaatcgcgtccccgtcgtgctgctcatgaccgggcttgacgggtataggcctgacaacagccagcgctcccacgagatcatcaaccgtggctgggcgacggttatcgttgagattcccgggacggcggactcgcctgcagatcccgctgaccctgagtcgcccgataggctctggtccagcgtgctggattacatggatcggcggccggagtttgacatgtcgcgtgtcgcggcgtgggggcttagtgcgggtggcttctatgctatccgcgcggcttgtacacaccgtgcgcgtcttgccggggctgttgctcatggacctggatcgcactttgtttttagccctgagtggttggctaaggcaaatgatcatgagtatccgtttgtgtgagttctgactgggttttggttttatgtggtggaatactaatcatgatgtaggcttacttccgctatggcggagaagtatggctatgacaacgaggaggagtttgtgaagaacgctcagaagaagttctcgcttgtggagactggtattcttgaccaggataattgccggttgcttatgctcaacgtatgtattcctgttcagccgtctcgagaaagaaaacaaagctgatatgtttctagggcgtggatgacggcgttgtcccgattgaagactgcatggagcctctcaagcatggcggtcctaaggaagctaggttgttcgagaaccgagtgcacatgggataccctgatagtctgcctgtggcttacaagtggttggagagtgtgctatctcctaataagaaggaggtgaagaactga

SEQ ID NO: 7 - DNA, 8606051 bp, Penicillium roqueforti (residues 1-1,721,211 of 8,606,051)
  misc_feature (89140)..(89587): n is a, c, g, or t
  misc_feature (91419)..(91649): n is a, c, g, or t
  misc_feature (329894)..(330030): n is a, c, g, or t
  misc_feature (430781)..(431112): n is a, c, g, or t
  misc_feature (461664)..(461680): n is a, c, g, or t
  misc_feature (496398)..(496577): n is a, c, g, or t
  misc_feature (532001)..(532095): n is a, c, g, or t
  misc_feature (539751)..(539886): n is a, c, g, or t
  misc_feature (569534)..(569738): n is a, c, g, or t
  misc_feature (649051)..(649187): n is a, c, g, or t
  misc_feature (691112)..(691174): n is a, c, g, or t
  misc_feature (866526)..(866690): n is a, c, g, or t
  misc_feature (1032440)..(1091839): n is a, c, g, or t
  misc_feature (1092526)..(1092737): n is a, c, g, or t
  misc_feature (1210194)..(1210406): n is a, c, g, or t
  misc_feature (1240552)..(1246824): n is a, c, g, or t
  misc_feature (1247751)..(1253683): n is a, c, g, or t
  misc_feature (1258302)..(1372301): n is a, c, g, or t
  misc_feature (1374135)..(1374543): n is a, c, g, or t
  misc_feature (1457542)..(1457828): n is a, c, g, or t
  misc_feature (1505355)..(1505527): n is a, c, g, or t
  misc_feature (1513226)..(1513388): n is a, c, g, or t
  misc_feature (1624048)..(1624249): n is a, c, g, or t
  misc_feature (1669160)..(1669365): n is a, c, g, or t
  misc_feature (1761186)..(1761412): n is a, c, g, or t
  misc_feature (1817726)..(1926025): n is a, c, g, or t
  misc_feature (1933126)..(1933376): n is a, c, g, or t
  misc_feature (1963938)..(1964315): n is a, c, g, or t
  misc_feature (2150469)..(2150567): n is a, c, g, or t
  misc_feature (2196699)..(2196907): n is a, c, g, or t
  misc_feature (2250693)..(2250749): n is a, c, g, or t
  misc_feature (2391495)..(2391786): n is a, c, g, or t
  misc_feature (2493532)..(2493763): n is a, c, g, or t
  misc_feature (2532138)..(2532415): n is a, c, g, or t
  misc_feature (2536284)..(2536525): n is a, c, g, or t
  misc_feature (2786532)..(2786788): n is a, c, g, or t
  misc_feature (2859489)..(2859780): n is a, c, g, or t
  misc_feature (2873900)..(2875004): n is a, c, g, or t
  misc_feature (2881521)..(2881826): n is a, c, g, or t
  misc_feature (2897075)..(2897253): n is a, c, g, or t
  misc_feature (3050650)..(3051374): n is a, c, g, or t
  misc_feature (3057165)..(3057416): n is a, c, g, or t
  misc_feature (3069515)..(3069890): n is a, c, g, or t
  misc_feature (3075746)..(3076120): n is a, c, g, or t
  misc_feature (3305143)..(3305240): n is a, c, g, or t
  misc_feature (3318429)..(3318753): n is a, c, g, or t
  misc_feature (3502740)..(3502854): n is a, c, g, or t
  misc_feature (3538027)..(3538610): n is a, c, g, or t
  misc_feature (3783442)..(3783656): n is a, c, g, or t
  misc_feature (3992300)..(3992418): n is a, c, g, or t
  misc_feature (4005200)..(4005463): n is a, c, g, or t
  misc_feature (4027390)..(4027590): n is a, c, g, or t
  misc_feature (4058485)..(4058631): n is a, c, g, or t
  misc_feature (4267325)..(4267362): n is a, c, g, or t
  misc_feature (4352819)..(4353281): n is a, c, g, or t
  misc_feature (4361818)..(4361970): n is a, c, g, or t
  misc_feature (4393748)..(4393981): n is a, c, g, or t
  misc_feature (4451480)..(4451617): n is a, c, g, or t
  misc_feature (4461509)..(4461755): n is a, c, g, or t
  misc_feature (4481215)..(4481333): n is a, c, g, or t
  misc_feature (4533880)..(4534017): n is a, c, g, or t
  misc_feature (4590140)..(4590368): n is a, c, g, or t
  misc_feature (4668962)..(4669294): n is a, c, g, or t
  misc_feature (4737136)..(4737230): n is a, c, g, or t
  misc_feature (4766758)..(4766955): n is a, c, g, or t
  misc_feature (4834538)..(4834845): n is a, c, g, or t
  misc_feature (4927504)..(4928077): n is a, c, g, or t
  misc_feature (4945086)..(4945236): n is a, c, g, or t
  misc_feature (5082742)..(5082890): n is a, c, g, or t
  misc_feature (5112783)..(5113504): n is a, c, g, or t
  misc_feature (5314860)..(5315053): n is a, c, g, or t
  misc_feature (5372796)..(5373223): n is a, c, g, or t
  misc_feature (5459177)..(5459288): n is a, c, g, or t
  misc_feature (5480488)..(5480661): n is a, c, g, or t
  misc_feature (5535630)..(5535644): n is a, c, g, or t
  misc_feature (5567778)..(5567917): n is a, c, g, or t
  misc_feature (5599006)..(5599219): n is a, c, g, or t
  misc_feature (5727051)..(5727129): n is a, c, g, or t
  misc_feature (5743562)..(5744030): n is a, c, g, or t
  misc_feature (5807724)..(5807810): n is a, c, g, or t
  misc_feature (5920056)..(5920734): n is a, c, g, or t
  misc_feature (5922048)..(5922354): n is a, c, g, or t
  misc_feature (5942930)..(5943209): n is a, c, g, or t
  misc_feature (6011395)..(6011690): n is a, c, g, or t
  misc_feature (6325216)..(6325534): n is a, c, g, or t
  misc_feature (6397626)..(6397737): n is a, c, g, or t
  misc_feature (6604883)..(6605053): n is a, c, g, or t
  misc_feature (6843817)..(6849568): n is a, c, g, or t
  misc_feature (6859923)..(6860563): n is a, c, g, or t
  misc_feature (6915280)..(6916067): n is a, c, g, or t
  misc_feature (6919371)..(6924241): n is a, c, g, or t
  misc_feature (6950690)..(6950826): n is a, c, g, or t
  misc_feature (7010241)..(7010478): n is a, c, g, or t
  misc_feature (7088835)..(7089058): n is a, c, g, or t
  misc_feature (7281128)..(7281307): n is a, c, g, or t
  misc_feature (7435487)..(7435612): n is a, c, g, or t
  misc_feature (7580177)..(7580497): n is a, c, g, or t
  misc_feature (7598174)..(7598323): n is a, c, g, or t
  misc_feature (7639388)..(7639504): n is a, c, g, or t
  misc_feature (7648598)..(7648805): n is a, c, g, or t
  misc_feature (8007544)..(8007730): n is a, c, g, or t
  misc_feature (8053265)..(8053730): n is a, c, g, or t
  misc_feature (8129413)..(8129828): n is a, c, g, or t
  misc_feature (8134123)..(8134311): n is a, c, g, or t
  misc_feature (8188405)..(8188554): n is a, c, g, or t
  misc_feature (8240083)..(8240554): n is a, c, g, or t
  misc_feature (8245992)..(8246103): n is a, c, g, or t
  misc_feature (8305274)..(8305864): n is a, c, g, or t
  misc_feature (8314230)..(8318347): n is a, c, g, or t
  misc_feature (8345692)..(8345793): n is a, c, g, or t
  misc_feature (8408069)..(8408275): n is a, c, g, or t
  misc_feature (8424960)..(8425085): n is a, c, g, or t
  misc_feature (8481845)..(8482068): n is a, c, g, or t
  misc_feature (8597364)..(8597610): n is a, c, g, or t
gaccggacgcggtgccgccgctgcctttcgggcccgtcctacgataatcattatagggggatttcttacgtatgggttcggatgggtttggatttacaggactatgaggtataggaatgggctgattccactcttcacaattagcatctatctatatactctgggagagctcccgctcggcgttgggcttcgagttcttgcttaagttggatgaaatgcctgcatagtcatacgcaactagttagactataacaggttaattgacctttgattcatcgattgataaggctctgtgttttatgcttcttcgaagaacgtggatatataattgttgtattttctcaagaccaacaatattatctttttcggcggaaggcattgcgcagacttctgggcttcccttccgatcccatactgattctttgccagaatgtatacatttcgtgaagactgcattctacaggatattaatgctttttctgtaatgtagaaaatacctggaaatggttttcatacaggatttctgacagcagggcatttaaagaagtgtgaattgggcctttacagctatattatttgtaggcgtttacataaagaaatatatttgcgacagctgtcattcgacaatatatgcgaccgatgttagtagcgtcagtcacaagaaataactctgtaggcaagggacgcggcagaagaagtttcagctagcgcaacacaggcaatatatgtggatattgtacgatgaccaatcacctggaagcagatttcaataagatacaagatgagatgaagaaagctcagttcaactcgagagtaatagatgttttccactcaggactcgcatccagtaacagccatgcagccagcaagcaagacctcaaagaatcgcactggcaagaagagcagcaaagctgccaaagaggccgcctaatcatctaacaacgttgctaacctgttcacataaactctccacacagtacccattctcagtcccaacctctggacataaggaattggatatgcggcataggtttagatgactatatggtttgctctgatcagctttcatcccaggcacggtggcaaaatcacaagattaccatcaagacagctttgcagaccgtacaaatcgacggcttacggtctgagaggaagcaagatgcagcttgacgaaggcagtaaggccggggcccggggtgtcatcctggaaaacaccatgtacctaacctctcaatgcaaattagctaaaaggccatcatcatcaatcccgcattgttaaagtattacaagtatgaggtataatattgcatgtgaccagcgtttgtgtaaggaaatgttgcaagtgtatggttacagtcttttaaatacgtgaggggaaactcgcttgtgttgagagggttccaagaatattgaaacgcacaaacgcacaacgacaagtgagcagatatttcatccagtgcaatcgggccgaatcccaaacatgctgtgatacggagagcatcgcatggtttctattaggttgggtaagccaacgactaagtacgatctagtacaggagttgttgggagtacccaagtgtgcagaatggtccgtaccattggcaccagccccaagacctttggaaagccaagcatggatttcgacagatcataagttttaacaggcgttgaactgttgatgcgcgatggtagatggtaattaattcgctctgtatatttctaactactcccatataccctgatccatcctgatccatcctcattcatcctcggaaaatctactgtttttaatcaacctggggagcaggacttgcccatcggaggctctgcgcaagtactctcccaacaacacactcattcctgcttgttcggcagcattcacccactcgtcgagtgaaacgacctgaaactgttggcccgagctcgattccatcaagggcatgatttcatcacgtccaatcttcgtctcgccagattcatacaaatacgtcacagcctccgtagtggcgataccagattggtaaacggcctcgaggagttggcgtgcggccgactgtacggaaaccagatcgaagactcctgaccatgagctcgagtctggcactttctgggtttctttggtgaaccgcatgacattacccataagatcaagttccggcgcatcggtaccggtgatgctcgatgggcggtgtatccataccggcagaccaaatcgacggttgacgtgctcgagatatatttcgctcacccacttggcagcgatgtatccatctgttggtcgagatggaggaggatatgacgatacagacatctcgccgaagctttcttgaccagtaagccgtgcaacaccagccgacgaaacaaaatgtaatggaatacgccggggcaatgcaagtttgacgatttctttcgtcgatgccacattgatcagcttgagagtctgatatgttttcatgaacgacacatccgcgccattgtgaataacgatgtctgcacaggagaatatagatttgatctcagattcagatagtcctagttgaggagcccccagatcaccgtaatgcaagtgaactttcgggtgggaaaatagttcagataaacccgatgatcgttttctgacagcaagacaatgaacggacaaaacgttttcatcatgtataagacctcggaggatttctttgccaaggaaacccgttgcgccagtgagtaccactgtcttgacccccgaggcgataatatgggtgctctcataattcagaggtggagtgaggtccgttgcgacttcaatctccgcatcccaattcacatccggctcgagtgcggggcgagatatatcttgaattctggccgccattccacgtagactgctggcttcgaaaagttgatacaatgccatagatgtaccgaacttctcctggattagaacttgcaggttgacaagagcgagggagcttccaccaacgtggaaaaagtcagattctgaatcaatcgagtgaaagctgctgagttcgcgtggtagtgcctgtcgccagagctgacgcaatgattgttcaaatgccgtgagggtgctgttgtccggcagctgggatgaaataaatggaatggaaagtgcgctgactgcgacgcgatcagtcttgcccgaggtattttggggaatgctttcaactggaatgatagcagcaggtttcatatgaggtggcaatggcagctcctggagaaggcgggcgagaaattgaagtatattttcagattcgtgtgtggcagccattataacaaaggcaacaagaaattgatcgccctcagattggtttgcatctaaacgaaccgataccacagcttgtgtgatagctccagctgaagaactgacgatcgccgtctcgatctcttcgatattgatgcgaattcccctcaatttgatttggttatccccgtccatgcgcccgaggagaataagaccaccatcgcgattgagctttccgcggtctccagtgcggtgaattgttgtccagtctttctcttggaaaaatttgcttgcgtaccgatcacttgaaaatcgttcggctgttttggtgccatcaagatagccctgggcaactcctgcaccaccaacgaccacttccccaggaattccgatgggaacagggttcaaggtttggtcgacaatgtaaacggagtagtttggtagtgtataaagagcttgcgcaggggatgttgatgtggaacccagcaggtcgtacggaacttcactggctgagcatgcaacactgatttccgccggcccataggcatttatcagtttgaggtctggccgatgaagattcttgatctctttgatcaacccacttggcatgaattcaccaccacataccgcggttgataagcgagagttactcagatgggagcgaccataacgcaaccaagcgagatattcggtgggggtcgcaagggtgcacgtcacattctctgatgcgatgagtcgcgtgagagcaatgggatcccctcgtgtgagatcagatgcaatcacaagggtcgccgcagagcatagagagaccatgatctgccataaagacgcatcccaagcatatgatgattgatgcaggatggtctcattcccctgcttaagttcccagacgacactggatgactgaacgtggtgaacatatgctgaatgcgcaatcataattccctttgggacaccggttgatccgctggtatacatgatcaccgctgtctgacttgggacagccatgtttcggatggggcgtgcagtagaggcgtttaggctacatacgtcgataggttttgccgtcgtatgcagaagcgtatagtcaggcatagattttgtatcaaccaataccatcggtgcttgtgtttctttcatgatcattgcgagtctgttcatccccacctttgtgtccaatggaatgtaaacaccaccgacacgcaaaatggccatgagagaacatatccagtctgcacttggagactgtaaaataccaacacgggtgcctgagccaacttcgttgcgtaggagttcgttggcaataacatcgatccgacgctggacttcactataggtcaaggagtttccatcgtggttcctcaatgcgacacggtctggataacgcgaggcaacctcatccaggcgatggacgatagtcacaggccattcatctcgcagctcgggtcctgcataataccatatttagcaaatgacctacaactagcaagggatgattgacttgcctcggcccgcaatcactgcctcttgaatgtcatctttcgaatgtaatttcggccaggtcacccgggttgctggattctggaggaaagaacgaaggatattgacataggaactgaccaggatttctgcatgctccattccatacaagctagtctgggcagacaggtgaattagcgtctcgccggcaccgacattgccaacatctagaccgagatcgaaagaagtttcgccgccgcccaaaagtgcgccatcggctacacaaccacaaaagcttcgtgattgctcgaccttgggtcgatagttgaagagggtttggcacagaggattatgagatgcggatcgtggaacgttgagttctgtcaagataacatcaaacggcacacgcgagtgggaaaacgcaccctgtgtgatgttcctgacctctttgagagattctccgaaagattggcctggctgttgagagaacctcacaggaaggaggttcaagaaaagtcccacgctccgtagtatgtcggcatccgtacggtttccatctccgaggccgatgcaaacttccttcacatcaaaaaaccgtagaagaagggtcttccagactgccaaatggaagtggaagggtgttgatttgaacatccggcaacaccggtcaattgaatccgataaactgacatcgagacgaatatgtgcagtatgggaacgaaattgagcaaccttagggcgcatgggttgtagagcaaatggaagaaggggaattgtgggtggaatctctgtatactgggctcgccagtaagcgatatctccagcccaggtgccctcttcgtattcacgaagctgccgcatagtaaagtctggatattgaagtccatcttcagaaaggggttggccttgatatgccttttccacatctgaccaaaatacttcgaagctaataccatccatgttgatgtgatgaaagccgaagattatccagtgcttttctaggtcaagcgaaagcagctgaacacgcatgacctcgccatcagagaggttgaacacgtgcgccttcatctgtttctcggcctcttcaacttctgccttgtcggagattgcaacatgctccaactgtaacgaagatttcgtccaaacgccttggatatggttccgttcattgtcagtgaaaaaaaatgtacgcagggcttcgtggtgttgtcctgtggcttttacggcatttgcaaattcttgaattctcaggcgaccagacaactcaaatgtcggtgtaatattaaatgcagttttgtcctcaacaagatgctctaggaaccagaaacgcgactgaccataggacatcggcagagtcctttggatttcacgttttgggggtcccactttgctgctgtcagtaaaaacggatgatgaagtgtcatcattgtcttcggaattcgagtctccggtaaataacgacgtcgccgagctgccactgtacgcattcgttgcatcaggaagtgcaaaatttgactccatagaccttgctctggtatctggaactattttatccacgggcaaagtgggggaaggtgttgaagggttaggctggtgcgcctgtgactttacagcctgttctgccatcacattggggatcaaagattctggcagaacttctgcagcagtggccaaaagctcacgaattgacgccgcgttaaagattttcagcaccggcatatccacccccagctccttgaggaaccacgatcgaaggtcaacagcgaccaatgaatcgacaccaagctcatccggactcatgtccaacataggcttgttgggatcagcctgaagggcggactggagcttcaaaacaaagctatctaaagacagctgttagtttcagctgggtatctaacttgggatgcctgtaccttgcaagatctcgatgacttcctggtttgaagttgcctcgaataagcgtgtttttatcaacacgccagatttccctttcttgtctgtcaccacaagtttgctagacttgtagaccagatgttgaaaaattgggttagaaacccaactcttcgactcatcatcgtcaattctgagtccacagcataactcagcgctcccgacacgctccctacaagaaagtacaccttcggcaaacacctcatggaagtcttgttcagacatccatgaatgcccgactcggtaaaggtatgattgctggcccatgttcagctctcgtgtaacgtagccgttaccgacaatcgcgccgatgttgatcgcatgtgctgccaatccacggtttcggcgttgggctgccagactcgccataaacatattcgcggcattataggcaacctggccagggtttcccgtcatcgcagccatcgacgagaagaaaaccataaattccaacgtgtcctctgggaacaattcgtccagtaatatactaccttcaactttaggacggagaaccttctcaaggcgagggagatctaaatcaatgaacattgtgtcctggagcaccatcgcaccttgtgcaacacccgcgataggaggcatggtttcgctgatgttacgatgggttgcttgaacagattcccgattcgttatgtcactgcatgtgttagccaggcgtgagtgattggaaccaaacaagagcttacttggagaatactcggacagtgcatccattcgcagccattctctgcagccattggtcatcgatctttgggtttcgacttgatagcgcgatgtatcgtgccccctgtccgatcatccactggcaaagcgacaaaccgagcccgcctgttagtccaactagccagtaagttttgtcctttgagaatttgacagctttggtagcagggcgaacttggacagcaagctgcgattgaccccatgcaattaaagactggcccgcaagcggagattgtgcgcgaatcaggtcctcaagtcctagaggaacaaacttgtgcatattaactggcatcaggtcgtattgtgctctcgcccaggtattctgcagctgcatagccaattggcctgtatctgaggtgtactgagattgagagatgtttgcagtcaaagtgctctcgctctcaaaatgacagtctgtccgcaagcatgtcctcaggagagtagtcacatcagagctgccactcatattgacaaggcgtgaaatattgccaggtagcttacttaatacttcacgccgggtggagtttgggtggattcggatccatggccatgagcaatgtccttcctttgttgtcaaaaggacaagttgcacacccttttctgctgcgtatttcgtaaggactggtgctagcgagaagccagggtctaacacggccaatattgttcctggttgaagctgttggagcatagagagagcaaggaaatgggaatagagggtgagtatcgatcgaattcctagctcttcggaatctccacatcgcaccgtcaggccatgtggcacacgaacttgagagtccagagtatgcgacagagcgaccacacgctcaccattccacttattcttcccaaccagcaagaaataattgtccgttggagtgatgcggacggcacggaggaaagagtgagccacatcaatatgcacatcatccgggaaagagggcgagtcttgagggtccttttcttcaatttgatatccaatttcagttggtcggatggtcaccacggattttttacgttcaacctctttaataataagacgccttgaggaattgtatcgatcgttccgaccagagttcaggcggaatcgaggaactttgaaattcccattctctagcagcagctccctctcgttggaccacaacatcccatcgagctggccactctgatcccaaatttcggcggcttccaaatggagcagctttgtagcgataatattggaatcagcgtcataaagcgaacggaggttcaggaaatggatatggaggtgagtcatctccatggccaatgtgcgttgaactcctgtgaacatgttgccatagggattctctccctgggcaccgtgtcccacccacagaacattcttgctttgtttgaagagctcttggaatgacctcagattattaggagacatgtgcctgagaacaggcccatccaattcaatcagactaatcactgaccccattacgggaagatttgccgagacgaggtcatctaaagagccagctgtgtagatattgctgtagtggggacggaccgcagtcttcatatcggctacgatatcagcagtcaaggatgttttccctccgatgattgtcaacgagttcacacctagtggtgtatgattcgctgctaggggatcacgaagaaaattgacgcggtgatcgacagcttgggtaatcatgacggagaatggcagaggcgaggttctggaagatgacaacaaggcttcgaaaccagaaaatcctgttttttgcatcaatccttcccatttctcctccgatatacaaggggataaggttcgtccctccttgtagcctaaccaccagcctggtaggccaccaaaaatcaacccgaagcgcatgacatccgagtcggtgagttcgagcataaccaggtacccaccaggctttagtagccgtcgaacatttgtgagggttgactcaagatttctggtggcatacagggctagaggagcaatgacaaggtcaaaacaaccctcttcatagtcttgttccccgatgtctttctcgatgtccaacaacttgaatgccattctagattggtaatccgagaatctttcacgcgcgttatcgaactgtgagtccaaaatatcggtatatgtgtatgatgtaaatgaggagcccattgcacgaaggactcgttccgaagtagcgccggcgccagctcctgtaataaattagtattgcacacaatttcaaatctgtgtggactaaccaatctccaaaacattgacatgggggtatctatggccgatctgacgagccgtctgtgcgatggtttccaagtatgcgtctattccaagtgttttggcgtaaaattccgctagcatattgtcgcgcatcaggatttcaagtaaattctgatctccgcgaatgacagcaggaaggttctccccaacggaacacagtgctttgatgtcgatgcagtcggaatgactatgtagatcagtcagtgtgattcaatttcagtttgttaggtaaacaagagttcaagttctcaccgattcagaattggagcaacatcgtccatggtgtcattggcccattccgcctttgcgaatttatgttttccattagcaacagaggttgtacaatgctccacatatgagagaaaacgtgtatggtcccaagttgcatttgcatgatcgaagtcctggagcgaattttcaagttttttcaagtagaaatgtgccacgcgctcgagatccacgcctagggaaccctcttggggaagcatgccttcagctttcttaagttgtcgcaaggtgggtctatcaacatcccataccacttccgtgaaaaagggaacatcatttgatgatgtcaatggactcaagggtgtggtatgaagcccttccagttgaaccaaagtatgtctcccgtctgctgaaaatatatcaacatcgccagagagttcagcaaagcgggcatccgtgaccgcagaataaaagggcaaatctgtaccacaagcaccaagagcgacacaggcggttggattgaggcgaagcctgtcaattcgagtgggaaggtaaagggtgcgcaagcgtccatcacctggaaaggaataagcaagcatgatggactgaatagctccgtcaagagaggctgggtgaatgatcaacggtctttcagttttggaatccaccgggacagcaatcaaacccgatgcctcgtccatttttctgcgcaagttgaaaagggcctggaaggggccggtatagccaaacccaagctctgaaactgaattgtagaatcggtctgcttccagatccaggaatgagccttgcgggtgggcgtgtggtgggaggatatcgtgcttggggtcacccaaaataatttgtatggcggcagatgcgtgaagagacatgttggatgaccccttattagcgtcagaatgacaggcaaaggacgcagacacgcaatcggcctggacttggtcgatggaaagtctgaaaatcgtttccactcccccgttctcttccaataccaatgcctgtccgatgaccacatcatggaagtcgatcagttgcacagaacccaggccatacttttgaatgatacactcaaccgccgccgatatataaccagctgcagggaataccatttggccttggacctggtgatgtgccagccatggaacctccctagggtgaagatagttgcgccagcgtaactcattgtctgtcccatcggggcatttgacacccaatagggggtggaatggttccttttcagtgcgtattgcggtagatgatcgagattcgtgccaataaacccgatcatggtcccacgaatacgatggaaggccttttatgagctctggagatcgagtgttttgattttgcattgctttcatctcaaaccctgcgaagtccacgacaccctcacccaaggcaatccatagggcgcctagggcggatgagaaagcctcgctgtccttttttccacgatttagggtcccggtgtaaggcaatgtctggccagacacttcttggatcgtctgcattgaaggtcctttcagtgctgggtgaggaccaatctccaaagccatgtcgaatggcccagctgcaccaacggcataagtgacagcctgggagaatagtacgggcttgaccatgttattgctccagtacgtgtcggcaagattctcatccacgctgtcaatgttttccccatacacactagaaatccaggtagcactgccactcggtggacgctgaactgttatgccgcacgtgcggatcgctgcgatataaggagctgcgcaggaaagcatgtgatgtgagtgataagctttgtccactttcaacaagcgagcaaattttttctcatcttcaagaatttctctagcctcatcgatcgcatcggcgtccccggaaagtgtgacgctggcggaggagttgctagctgccacgcaaattctgttctcgagggacggcatctcgcaaagctcctttgcatcctcaaatgatgttcccgcggccatcattgcccctatctgtcctccctgggaagttgtatactgaagagaccatccgcggtaataggcaatgcggatagcatcctcttcgttgagataccccgcggcatacgctgcggcaatctccccagacgaatggccaacgacagcagtgggtttcacattggctgctcggagaagctgaaccaacgcaatttgaatcgcggtacagagaggttgcgaaaacgccgcctccccaatacgggatgaaaacttatctttcacaagctcccccctcagcgaccaaacagggcgatgctcagtgggtaaatcccgcaaagaccgatcgagtcgggcgatacaatcactgaccattggcgagctttcgagcagttcagcacccatccttgcccactgtgctccttggcccgtaaacacccaaaggagtttcggttcgaggatacttcctgtttgcgtgcttggtgttattgccaaggacagtactgcttcatccagccctgcagcaagctctcctaggcttgatgcagacaccgacaaacgtactggcagagtggaacgtcggcagttcaatgtccatgacaaatcacggatattgacatccgaattatttcgcaaatacgccgagtatgctgcaatgttggtgagaagcgacttttcggaggaggcagagaaattgaatggtaacactgctccggagctgtcatctgcagcgttctgaccacaggcaagcgggcgcgtatcgaattcttccaaaattgcatgcgcatttgcgccgccaaagccaaagctgttgacactagcacgacgaggggtgttctctgaaagctgcggccattctttcgcaacttgaaggatttcaaggtcgttgtagaagggaagtaccgtggaactcaactcattgagcaataggtttggtgggatgacagcatgttgtaaagcaagtgatgccttgaggaccgctgctaatccagccgtgccctcagtgtgcccgatcactgttttaattgacccaacatacaaggggtgctctcggttactatcgcgctgatacttggctgcttgtccaaagaatgcagtactgatggcctccgcctcgactgggtcacctgcaggagttcctggttcggtcagcaaagccctacaacactcggtttcaccttcatttcagttataacttaccggtaccgtgagcttcgaaatattgtggccggtcggtggggttggaaagatctagtccagctcgggcatacgtagtccgaataaggtctgcttgagccatagggttgggcatcgtgattcctttggtacgaccgtcttgattggcacctgtctctcgaacgatgcattcgatgtgatctccattcgccaatgctgcacttaatggtttgagtattatggcagcaattccgtcaccgcgtgcatatccatctgcatctttatcccacatgcgcgagcggcccgtcggggagagcatcttcagcttgctctctgcgatatattgctccggtccaagcagaaggttggttcctgctgctaccgcaacatcagtctcgccacttcgcaggctctgtacggcctggtgaagggcaatcagactagaagaacatgccgtgtcgatggtcatggaaggtccccgccagtcgaaaaagtaggacactcgattggatagaatgcttcgagcagttcccgacgcaaaataagttgggaagttctgcacatcccgacccaacatatccgcatagtcattggtcatcaaaccaacatatacgccggtgttggacccttgtagcttttccatgggaatgccagatgtttcgagtccctcgtaaacagtctcaagcaagagcctttgttgcggatcaatcgagtttgcttccactggcttggttccaaaaaattgggcgtcaaacagtcgatgatcgtcggacaacaaataggaatgtcgaacattcgttgtgccatggtgaaggccatcggggtggtaaaatgctttggtgctaaaacggctttctggaatctcgctaaggacatctcgtggtgatctgagcaagtcccaaagtttcgagggtgttgttgcatcaccaggaaagcggcaggcacttcccacgatggcaatcggttctccggtgtgctgaagaccacctgtcattgtgtagctcgggtttcactgactctgcacaggctggtacgatcaatgtgtgactccgcgtatttctatgaagggtctataggatatcaatcatggacaatcgggacaagattttctttgcaacattcacactctagttagcagcgatggggagcggtacatatcattgtgccgatgctcgccttggttgtcagattaggatagttcggacatccaatctcgcatcagcttgtcattgttttcagctggttccgactccgaggcctgtctccggggttgtgatgtgaaacgagacaaatcatgatgtaggtatgggatccaccgggtttttgccatgtgtgcagataaacttcctgtgttttctcacttcatgttattctagaaatctagaaatactaggcttccaggggtttgaagtccggctagtttgaaatctcaagaccgagtccgagtccgagggtcattgccctgttgcatttgcatgttcgagatctcagcaagaccatcaaaccatcgatgagtcgccagcatggcgtgcagggatcgtaaatatttgtctcatggccaatggagtctactatattgcgatattgcacaacaaggatccaaggagaatatgcgcccgactactctttttcctaagtaattagcaatcggtaggttcagcatcatgcttcgactccgagatcaataacatacctagtccatgttctaatactagaacccctttttcccagatcaccactcttaggttcgcaaccacatttccatgtgccatggatcttggtcggtttgagtcttgacctcagcatattcgagtttcaactcctaatatccgatgatggctgcatattgtaatctgagcggtcagcacgtggaaaatggacgtgctctagacagtttgtgttgtctgcttccctatccctctctaggcaggaggtaaaaatattccccaccccgccctgtcttggtaatgctgcatgcagcagctaggatcaggataggcaggaggtgaaatgaaggctcgctggggacaaagcgcacggaagaggtggggaaatagaaggacccttggaaggtagttacctaagagaaggctgctgactcaggtatcaactgtggcctgaggcctctatttctttcacttatcggaatgaactgcccagatgggaataagacactctaatcacttgccaatagtatctttccattgcatacattggactgcagatagcgactgtactcaataaatataaacaaattcatcattctcccggtctgtcagatcctgaaacgcattgtccccaacttgcacagtctcaagtccagcttcctcgatgttatcctgcatttcgtgatagtcattctgcatcgaaacatcaactatttctgctcttttgccattttgtacacgtcgacgggcttgttgtttgttgaggaaccatagattagcccactggataagaacaacagcggccaaggtgctgaagattccgagacatgcgcgcaggcctgggtgataggctggcttatctttctcgttgaatagcaacgggccaatgatatttcctgccgagcttgctgcattgtacaaactcatgataacggacttcttggtggtgcctgccgtgttgccgatgatccatgtcacaatcaatggattgccgccaaataagaatgcgagtagatagtagccagcaagtaactggccctgtacagagttggtccgagccaccgcatacaaaattgctagcccggctatcacgggcagcatgaaagctgcgatgatagcgctcttcaaacgagcggtttgggcaagataacttgctagcagaatgatgaggaattgcagcgcgccaaatggcatggtcaacagagtggtcctgtacttatcgtagccaaggccgctcaaaatcagtggaccgaagacgttgttcacgctagcgccaatgttgaggagcattgccattccaatccacagatatgttttgggctctaagcacgcctcgaggacgtgattaaatttaaactcggtgtttcctgttccagtctggttggctcgaagtcgctccattccttgggctttctcctcctcggtgaggaaccgagcggtcgagatatcgttgtccaagcgccagtagacgattggggcagatgcgacagttatcaggccaacaacaagaaatatgctaaaatcaagtcagaatataccactctcgggggttgattggtttgatttcctacatctgccatgatttcagcacgtctgactctatttgtgccagcccgtacgatagagcagctgcaacgacggttgctaggccatttgtgctataccatgcagcgatccgtatcggttgctctgcacgacggtaccattggctcgtgataacaccaaagagagggagacacccggcctcaaataggccgagaaaaaaccgagcggccatcaaggagccgaagttgtggcatgcagccatgcatgtctgcgcaattccccacccgaggcatagcactggcataagaattttgtgaggaaccttgacaatcaggtatgaagaaaagggctgccaggcaagttgtgcaatgggtccgatggagccgacaagcgaatattcgttgccgacaaggcctgtgtctttctgtaaaccgaacgttgcaccgtatcccaaaactgtcttatcgaggatctgcaagaagtagacccaggcaagcacaacaagaatagtccgatcggtcttgcgacagatgcgcttgctgtcctcttcggtcaaggagacacgtacaataccactgttatcgatgagtttgtcccccttctgctgctctgcggcttcattgtgaacaacatctggtttggacatggtgggttcttccatcgtaggagaatatctataccatgatcgtccctatcaaggcatatatatacatatgtacggagtagggtcagttgccgcgcctcacgtcattcggtgaattctaggtgtttccccatgtttccccccacgtctccgcatgcccccacgaaagtctaacgcgcgcagtccacattcgccaagatatttagcgaaccaacgttgccggagattgattagagtttcctgtgtcttccaatcgattagaatatccttgccactttccatggacaacgcattgtcaagcttcggggtggagatccctattcggacatcccgtgattaccgagcctaaccgaaactcggggggtgggggtgagcccttgccgagggggacaggaatgcaggaatgaggccataaattacctctgcactttcttatttgacagtcggctaatgggagaattgtcggtgactgcgctctattgccgttgtatattgttgcaacgggtaaagaggtaagatgccgaagactgactgaaatatgtatctgagaaataattggcgcctgatgagttatttttccctctcgccggcagacaatatctcaagatattgaacaaatatgctttggattatcgctcccagaaagggaaaatcaaacgccgattactatctccacgcctagtttagagccctggaaagagcgaattcaagaaaaagacttccccaaatggacgacgcatgtcggcatatctacaaagcccgaaattcatacatttggcgcaaattatgcaacataccgcgaagcatagccacctcacctcccatttaacgtcgaaaaaatgttgatcacgttgatacatgccggattgcgagagtaccgcgccctaatctttgagtgaatcatgaccccaatttttgagcgatcggtaactcttgctattcgtgtcgtacttggctcgctcctcttgcgctaaatgacgcttgcagtaggataccacgcgacgcatgtggtcaatgtcttgatcgctgtagtcggacgggttctcgttgggattgtgctcgaggatccgcacaatccttcggccactatcactatgattaacgctcgtttcttttttccaaccactggaactctgcaatcgagggcgaccaaagtaagaattactgacctttcgtggccaattgtttccccggaactgcccgcccaacccgatgtttgtgattgctcttgctcaagccaaccacgaagctcgattggggtcatgttcacgagatcgttgaattcactgctcagtttgtcaaaaaaatttgtttatcaaagctggcaatggaaagatacccaatcacggtgtctctgtccttcattgtttccactgatgaatattggaattttggttagatactacgagtgatggtaatcactattggcacagtggtgagtgattttgctaatttgaagttcagtttgacgtcatagcggcggaagcatgttgctatgtcacgatgacaaggctggttgtagatacggtggacacctggaatcatgaagcagaattgctaaattcttagacaaatcggacctgctttctaaattgaacgaaggagattttctcgcgagggcaagtaaagacaatgccattaccacggccagaacaatcgaccatgcagatgtgcgcaattaaataacaaagcattgctcctttggttggaattctgatcgctggccatctcatatcgacttagatgtgtccaagcccattaagaatggttggtctccatcgctttccttgtcttttctttttcctaaatctgacgattaaatttaaccaactatgcagtcagcgtcaatcatttgaataaaagatattctgaattaacccaccgaccaagcctgggaccattgctccactgggctttgatggttctcatccttttgaattgggcgaatttgttgttttatcttgtaataatgttgacggtaacattgccgcctcgggaagtgatcggctcccggattccagggtgagttagtcaccccgccgccctaagctgcccactgagcgaccctgagctgctcagtgagcaacctgatcgctcaccccggtgctctcccttcaccctccgtcttgccttctagctttcgcctgctccgatggtaaccgcactgcctaccggtgttcctgggagttctggtctggagatgacgtattcccacgtcgctacagtgacttgctgtcctcttcgaactttccatcggttgactcgatcccttcggcttgcatgagatattcagtaccacctcacctctacaccctctcatacgttctctcgctaacgctgccgacaccacccagcaaacgatccacaaaaattcaccgttgtcctcgttcctccatttactgtgccaatttgatcccaggaacaacattcgcaccagccttcgggcaacctctttttgtgtggtatacctaggtctcgaacaactcgccgcgccgtgtgacgcaagtcgacgacatcggctgacggatctagtttagtttcgggctagatatctgccactgtgaatgaattaagctagcattcctaggaaccctttcctataactgatccctcgcacctagaaatggctctgcgattggctgcagcgaatactggggccttgtcgatagatccagaatctatgccgattctgtcaacaattcgctgctctatctcacgggctgattgaaacgatgaatcgaaacaaataaatagtcccaactatccctcctttgcagcgtttgtttgaaatatcatcgaacgtgaattttactgcctcctgctttgattcccattcattcagaacctcttgaatctacctaccatggtaacgctgaaccatcaacgattttggcagccattaccaagagcttcagtgagacgctcttcaaccggctcagaaacccagactaccgatgtagtgaggcaatcggacgccccagaagaaagaaatgaagcagactacaccctggggtgtaatgtgccacaagaagaacgcagtacattgagtctcggtaagacatattttaaacaccctcctcccatgccccttggaattaatacggtctctccaatcctagaacccggcgagccccctcgagccaattcgcctgaactctatctcaatgatgcagcatcagccgctggaaattatcctgactaccccgaggaagtcgctctttatccttcctcccgagatactgcctccgtgactggcttagaaggccctggtacgacgagagtcttcgatgtctttgaggacgatggcaccagacaaagcgatggggggtattacagagattgtaatccaaacgaaaggaagcgagctttggaatattcaaaaacatcctctccgaaacgatgccggcaccggacttctacggtcacaaatgcgaacaagccgcgaggaagacgagcacataaaccaggagccggaaattcgccaagcgaaatcacagagggcgattccgcgggcaatcttgcaggcctaaggaatgcgatcggatatttgaagcgcgcttacagtgtagtcactgctgaggccaaattttctgacgacctcacgggtgcaggaattctcaaagagaatcttgcagtgcttcagcttgcaacaaaaacgctacaacacgcatacggcatcatcgcaacaagcaccacagcaatggaaaattcagtgcgagaggctacgactgtaaaaccacggccaggttttacccgcaggaagtggacccccgaagatgggcgtcgactcttgaggttgaaagactctcaaaagctgtcatggagtagtattcgcgattcgttccccgaaagaactatgaatgcactcaggagccaatactctcgggagacttccaagcatttggaagctttttcgagtaaggagagccaatcggtcagcgctggtcggcaaccaaagtacacatcaaagatccgaagaagccctaggctaggcaaacctcaccaggtcaaaagtatgaggagcgaagtcgagcaccaccgaaggtatccctcgcgtgcaaggaatcattgcggtgataatgcattgaagttggattccattgatccccgactccgtgacctcggtaatgcctaagtccgccccactgtatttttttctggtggtaagaccggcataggatgtttggacagcaatatatcttctgcaaatgcgaattacggtcaatgctacaatgtgattagagcagaaggttctgtttccggagttctttatgtagataccgagcctatattcaacgagttgagacttcttgcaccgattacatgatacggttttttggtgcagtagaagtccgtatagggacctgctagagcttacgtagtgtagagactggtatgatctcttcaatatgcacaacaaatataggtcaaaatcttctaccttccaaaattggcgctagagacttatacctacgaactgatcttggaaggcgattgactacaaagaattatgcagcaaacgaaatgtatatgcattgaaaggtgacattcgagctggccgtgaacctctcacgtgtttttattagcttccaataatagcagatatcgtcaactatctctaccgagatgtaacgcgcagaatgaaaggttgtttgcgatcctgggaacacttagcctcctgggagtgctaatagtcgctgtcagggatatactttaagcataaaggatgcatggagatgatctgcgggacccacattgtgcatatgggttcccctgaacgcgaggaagcctgtatctagagtcagctataattgttcaccatattggttattcatgacaagacacttccatctatacgtatacgagagaccctcgcagtcgctctcaggaacacagtccaagtctcccagaagctgatcaaatgcatccacgctttcacttcgtaagactccttgagttccgggttcttcctaacccaatttgaaataatgctcatgagaagcttatctgcggttatttaaaataatgcctctcatggtagaagtgtttcagaatatacatatcaagaatctatggagtaggttcatatttaggtttttattaatccttcagcagagacatgggcctgtgctccccttgaggactttgcccctgatatttaatggctagctcgtccatcttcatttgaatcggctcagggtgatttgactccttgttctgtgagcgtccaataaacttgaattaacgagtgaaaacaagaggagcagcttactatttgttctgtagatagaggccactctttggcgttcgaagtcaacgtgtatagttggcctgtcttcttcattcggagaacgaagtggatgtcggcatcacattctgtacaatactcgaaaatcttctttaatagtgtctccctccttctcagacttttttgatttccccttctggcatgagatgttttgaacttgctgttggcgatatttgtaggcaatgatatgtttaccaccggagagggttccatttgaattctatccgctggcatcggtcaggctgtaaatactttttgttacctaggatatgatttaatataaggtgcataatgtctctccggctcaactaacaacgacaatgacatttattagaattgatttgtgttgatagatggatcctgtggtaaagcaacttaagctgtcatgtcttcaacgcccatgacttccgacttgaccaagcaagtacccgttgaatttgaacttcatttagcaaaaatcacttaaacgagggccataaaaccatactattatcactttaagggtttatattagctcagattgaagataggaagtgacagaaaggcaaagatcgagccccatttgaggtcaaccatcacctgctctcatgttcggtagataacgttcaaatagcacttgtatgtacagtaccataaggacgtgtaaataatcttctagattgagctgatatccagggtcctgttctctatagagatatgactgcttgtatgtaatgccatgtgcctgtgctattgctatccatgtcaccatgtgtcctcttgggtagactctagaaaattggtctgaagagccacattagaatactcaggattaataatcacctattgctactagagcattctgcaaaaataccatcttggaaatcatgattgtagccccttcactgtgattcacaagtttaattccgctggtcttgccttgaatagattgcatgtcagaaaattattccgcagtgacagcagattctattaaatgacagttattcaagtggcaagccactatttgagatagataacgccaaacttgagtttctataacctctcaccagaggtaagcgaagtgggatggaatggtttgacgcgtcaaacttttagcacagcctaggctgcactgtattcagaatgtactggaaatccggtatcgattgtcatttgtgtatcgtgatttccactctcgtgcgcattactggcatagccacagcgctggtaagctcagccacaattatatagattacccccctcgtctgtaatggaaaaacccgtatcgctgtgttcgatacacaatttcggtaccaacttcagcctggttcataccatattgcaacgttgaacgtggccacactacacattacgattgcctctgaaaatggggtctaatttcgtagcaaaccactatgcctctggactgtactttggatgagacgttatgacctacgccaatgcctctgttgccgcccgcattttattttcatgtattctatccagagcgaaccgttcctagggatgcccatcagaattggtcatgaattcgtatacttagttcgtctgtcaatctagtgtatgtctctctatgttatctccaaaagagaaatgatgttcatcgtgaatcagcaagtcacctcgtcttttcgagttatcttttactacaagttaattttccactgcgctgtaaataccaatcttgtcccggcccattgcatcaccaactccaaacccttggtgtacaactttcgagaacattcccatcattccaaggggcaaatcaaggtgtgtaatattgccatgccacatcaattctggcgacctgactggcatctggccgagctttccatacatctttagcccagtcagatggggctattggtcttgtaagtcgtccgtttgcttctaatttagtgctgttgagaaatcggaagcttcatttaaacatgttcttcgagatttattcgatgtgtcactagggattgaataaacgggggaggtggacaaggggctattcaaaaccgttgaagttgggggtgttgaagagcgttagaagagacatatccccaattttcccgaggcccccagaatcgaacgcctctctggccctcccgagaggcactaaaggcgaggggagcgttgaaagttgagggacacatcaatgacgactttggcatcttccttgtggcgttgaactaggattgcttggatttgggggtaaccaaacctttgagaattcagataagtgcggtcaaagttgcactcgcttaaacaggaacgagctactaactgcgacgtttgctgtggctaattcggttctttgaccaaccggcagattgctatcctaaaggatcgccaccaccaacaggtggttaagcctcggttgtctcaaccatgttgtgtaaacttctgttctggatcacgtcaacgcattaaaggtgccagcactatcttcagtcttgtccaaggcttaattctgctaattctacgtcggagagacccggtgatatagtacctcaacggcaattatctcaccccacggtcccctcgccatcataacattctcaactatattaatcaagttctcaaatcggtcatggttcatgcccttgtggaccatccaaggtgattccgccactcggttccttgcgtagagtaggttttgatgtatagtgcggttcagcctattttgcgtagcgtacttcaactgcatcgaggaatgctgcagcccttgaaaagagagtcaatttgtggacacttaagagttcaagttcatctcgatcagtttgaacaaagccaaatctgcaacacaagcccatagcgtgattctgttacctagccttctcgcttcccctaatccacagccacttaatgattttcacgtcatataaatcatcgagatttgaccttcatggaaaggttatcaatccagagaacgatcatcacggccacttcctcaacgcctcaacagtacctgattggaccacaggcggcgaattagtttctgttgtcatatataaaacgtccattctcttctgtctttgtcttgctttgtttttctgtcacctgatacacaaaaaccagcagctcttggcccgtttagcttgggtaaggttcgagagctcctatcactcattttattaagtggagtcccagccattttcctaacatctcgcaatgtgtcttctgtctcttccacctgaattgatcttgctcgttgcaggcaatttggattcgccgaaagactttctcggcttcctcctaactagcccaaaatgttacaatctcctgatcaatgagctttatcaaaagaatgtccgctctgatggtggatcagcccttttgtggtacgcgagtcgtggggccgaacttggagtccggaatatgctgcgtgcgggtgcgaatgtgaatcttcgatcaccgaatcgggcacagttgacagctcttctggaagctgtgaagcacaagcataccagtgttgtacaaatccttctagagagtggggctttgccagatgcggccgacgcccgatccagaagacccttggctttggcgacaaatggtcgtagcgacgtggcgatcactaagttgctcttagaaaacggtgccagggccgattctgctgtgtttgacaagcatgctcctttatttgaggctgtccggtcaagccaggaatccaaagtagcattactcttgaaacatggggctgacacatacgtcttggactgtcgaaccgggatgaatctcgtgtatatcgcggcttctaagaacgctacttccggaattataaatattcttatagattcgggtatccaaatagagtctcaagatgatatgggaagaacgccacttcaagtcgcagctgaaaattcatgcacacgtgctgtgcgcctgctgttacaccttggcgccaatccgaactttaagaatatgaaccagtatcgggaaggattgagtgcacttttctacgctgcaacaaatcccaacagtcccggtaatggcaataaaagtatcatccgagcactgttcatacatggggctgagattgatactgaaaatcacgcttataagacgcctctactctatgccatctctcaaagtgctattaaacaagcgcaagctcttgttgaatgtggtgccaatatcatggctagagattccaatggagaaacggtcctccatttggctgcatcattatcaagctgctctcctagtttgatggattggcttgtcgaaaacggagctgatgcaaattgggccggcggccagcgtaatgagactccaattttctacgctatcaggaatttttatatccgataaggggtgggctgatgtgaactctcgggatatgcttgggctcacgccattgcacaagattgtcgccaaagaggagacgtgggaagcagctggggagttgttaaaggccggggctgaccgatgcgccatatctaatgatggaaagttccctcatgacatggttcctgatggcccttgggcggaaacgaaacgttccttgatccgtttttacatggcctgactaacattaccatgctcagtcacctttagaaaagctcttaattattttctatgtgcataaccattgcaggcaaatttgagagccccaatctccccatgataatgatcaccatatagactaccttggaaacatcttggtggacactgcgtactctagtcgcttgacacctttttttgacgtaaaagcagctccacgtacattgacatcaaatcagaaatccgaaagcctgcgtgacatactgcatgcggtgctgcaaaatttcaaggccattagccttatggaaggcagaccatcgtacacactacaaacatgcctagtcctgactttcttctgagtgcattagtcatgtggtttgtcattattcttggggtacagtgtcttggggaatccgatgtcaactatagttgttcttcgtatttattattcatctcaagatactgtccatctctacgtgaggcccacagttggctctttttttcctaagacattttgcaatattagtgatagacactgtcaaaaatgcgtggtcgagggtccaattatgtacttgaagcttgggtgcgtggacgccgaccgaaagctacacatttattttctttttagaggctaatgccgaagctggagacttctgggaatgggtattggttttcttgggagcacgcgttcggttcccagagggcatgtcaatggtttccaggaatggtcggtggtgttcccaggagacaatgggatcctaggaggagcacaatagtctcctggggccactatctggcgtcctggaacaatgcagtaacatcctgggactatatagtggcaccctggggctggtggacttctaaataactatgctgagatcatatatgctctgagtttgggagataagatcataacagagcgctcttacataccattctgggttgacaccctactgcaatcacaaattgcctctcgtttcgctatggtgaagtgggctatctggaaacacaactgtaatttttcttatggcacatgtgctggaattacggtgcccatactcacatttttacgtccaactcttcgtctctattcttcaagctacctgtcatggtgtatctagtaccttacagggctatccacagaaagcgccgttatcaagagcccaattggttcgctcgagtagcgtctatcaacagctccgaggtatgcaccctaaatacgctttagactgaaatttaaaatacatcaattggggtctacgcgcacgagaaacattgattgaaagcacatgtgcattctcagatcgttttgcgctggtcatcagttcctagttttctagtccataaaccaaaaatatccaatcattggcctcctagaggtgcccctttccatgaaaccgatgtggctccttcggcatagccatcccagtctttgaggacgccaacgatcccttctcggactttgccaagggcctcttcaaaaagggtcaagcgcgtgatctggttgttctgctgctgtttcaggtactctctttcccgaaacagctgggtgttagtgatacgcagctcgttgttatccgctgcaagactttggtcggcatggtgcttggaaatgcatgactcccacaggcgccgatagagccccacaagacgcgctgcttggatagcgagcttcgggtcttcttgctccattcgctctagggtttcaatggcaggttggaaagcctctgccgccagggcgcgcttctcgctttcggacgcggaggatatgaatggctatagtgttcagtgggtttctccgtaatcatatgccgcaacttacaagatgaccggtttcacactgcgagcttcctgttgctccattttcattcgtacttggctgtgcaaggttagaggcttgtatctcgtttgtatctggggacttgtcagaggtgtccatgatcgatgcttggatgcgagatctgaatctatatctcgaagaacaacgccttctttataggctcacatcgtcgtacaaaattaatttatggaccctttcttgaagcaacgatacttttcaattccgttgattgtgcatcgcacctcgcttttgttgccatactgtgtcggtcgtgatacgggcacaccactccgtttgtgtaaaccatagaagatagaaggcgctcgggtcgtcggatatgcgtatctgataatgttgtcatgtcataccaacgggggtttgaacattgttgagttagccatcattaaaaggcaagtctgggtacgtgtacaataccaccctcatcatgtgaaccaccccgacttatcttgagtattccggttccgaagagaaaaaagaatccattcactgccctcaattttgatctcaataggataggctggaagtgggctagactggtcgccaagcttgactgctacggggctgcaagaaggagattacaccaattcccggttttgctacccaacctagcagagaggatgaagagctactttcttcttataacaccatcccctcagtttttcgactcgatactctaccttagaacgatgcagtgagtatcaaaacgtaaattattgaggacattgccccaactatcgagtcggagaaaggtatttggtggtttatattgtagatataaagctatctgaagatccagaagccctgcatactagcgttctttacctctcgcactcagccgcaatggcccacgtcgcacgcaaaaggacgcgccagagcgctggcgatgtttcagaggcaacacctttgctagaaaggtcggcgagaaagacagaggggggtttcaatcagcaccctgaaggcacaacgagcaccagacgattccggactcagccatctttggagaagaaaaccaccctccgactacgactccgacaggagtactttgatcctgggtccgaagaggcttggtggacgtctctttcaacgcccaatccaaatggcgaggggcgaggacacaagcagctagaggagaacgccgacagagaacaagctcgactcggctggatgcagcgactgcgccctaaacctcatcgacgactctcttagacagaacggttgaatatggagactatatttcttgatatggtgaattgagtaagaaggatgctatgtacggagccaaaatgtctactatgagctatagtgtactgaagcggaccagatctgcctgaaaatgagatacagtatgcaagtccgatgatgattctacttcgcatgcacttttttagattctgccaatttctgtagagcctgaaaaagtgacgtcgtagaagccaagaatgactgacagttggttatgttcagatggtgatgtagagcgggaagtctgctacaaaggaattcaacagtctatactggctccttgctgagacattcgtccgttcaatgcacaaatagctaagctgccagcgaattgccgatccaagctcgattgtggtcgcgaagggtggttgggggatcgttggaggggtcatatgcagctatcctatcgcttttttgtggatgattcatgacgtatgctgttagtaggtgctccgagttcgtcaagcgatatggggaagaaaataagaaaatgaccggatctgctttgactgagaacgagctgcatgtgaatggttgtgcaatgtttcgactgtgcggtcaggcctttgatggccctctgctttatataggcagaccaacagccaaatcttatctcgtacatatagccgacacgatttggacgtgtccagctctctaaacaatctttgcttgggttggtggtcatgggatcactggtcgttagtccaccaccaccgagtggttgaaccatcgtttatgttcaatctggaggccattagctagtagtatatagtcaaggccgtagtgctaagggctgctctctttggagattaccgttgaaatctatttacccctactccaatctgttagtccgttactccgttaatccgttaatccgtttgaagtctaaccgttcggtggacttcgatagatgcttaacgaaccgtcaagcgatcttcacggatattacgaccctatgacaacttttttctagaggaaatagttagttattaaaaacgtagctgataagtctcgtatatttatccgtattaaaagaaaaagaaatgactttcaaaagcaacgaaacgcgcgccgcgatgagatagtaatgtcgagaggcgctatctgtatatatctataccttttttccgtctcagatattctatggagaggggaagctgatgaatcttagataatcgacttggccttgatattgtacctagctaagttcgcctctagctataagtcgaggacggatacgcttggttagtgacggaatctaggaaattattattgtagtcgagcttaagtaatagaaccgtcggcctatttcgggctatatatgaaaaattgggccggtcgctcgaagtagttatactgtagaccttataggaatctgtctcggggcgggacgatgatctaggggaagatgtaagatatcctctacctgctaggtttcccggtactcaataaagatataggaagatataagggtgtaataggatgaagacgggttatttatagtaaaaatccgctaactggaaggcgcgaaccgcgagctaggggttgagctcgatcgtacttaggcccggctagacgacgcgtatagcaaaagcgatcgattctaggaaaagtctcgtcggcttcgagctgaggttaaagctagctcgctccgggctagtcggctagaggctgaattgacgcgtgttagagcgggagtcaccgaggcgatgaaggctttataaagccataggaactataatagtagctcgccggcgggagaacgcgatagggattgatgtcagggaataattcgcgaagtggcaccgtaaaccttgaggagaggttctaatagaccgacttgctaacacattgttttgtttttttatgttctgtaagcacatcagatgcgagcatccgtaggaattcccacttatcttatcgagcctacttatcttatcgtaacctcgataagtaggagtgggtggatcccaagttgaacccccataataggaaatctcatattgtttgtagtgaaaacacggctgtatcacgaccatcacgcgtttttacgcgtcggtaagctatttctggtaatatataagtctcctaaaaaggattagccgcggatgagctgtgattgaaacggcaagtgtgcgtttggtttcttagacagaaaagtaataggagacgactatagatatatatatgtatatatacttcggattaagagaaaggttttgtctaataatgccaagccgtaggaagtgacctaactaataccttataacccctaaaaaccaagccgaaagaaacctcgtagggaatttactctagtgattaagttgagcgatatccgaaagtatatcagaggtctctacgtagacaatcctaatacggttagatttacggtaaagacagctatatctacgcgacgggatttcccgcacggatactaggcgcgaatatcatgcgcttcttatgcgtagccgagaaaatcaagttcgtggtacgtatctttgtttactatatttactagtatttttaattcccctttagcccctaattgctcgaagaatttactctgcctggtcagccgtagtctcgtataatagataaggtaggattatacttactcgtagcagcttattaaccgatagtcggtttagatcttccgggagactctaggcctcggggctctattttgttcctagagagcttcttattattaagctttagactatattagctagggctattagctttagagttgcggcgtctatctcggtcgcgtcgatttagtaactatgctccgcccccgctatatattcctcgttagtattacctcccgaaggtattcgaaaattagactgctccgtacttactaattttaacgataccggactccgtaagaaagatcgtatcggtacttaaggtagctagtactctgccctacctacggagatgctttattccttttaggacctaataatcattagctattagtttcttaatagtagcgaccctttccttcggaaaggggagggaaatagcccgtacgccctatacctaccggctaaacaatcgcggtgtaacggataaaggtccgtacaagagggaaacacatgtaaacctgcacaggctcgggaaggaacatctatgtcatcatacatctgtttcgatgtcgatccgtgaggggttcgtcacatgaacataggcagatagatttccttatagtttaggaccccccaggggcccctccgagactggcaagaattagtcttggcacaccatcaatacattgtgttccctccacaaagccctttgtatcttacccggttgacaggccgtacacctacataacgtatacctttacaattctaattcttcttcttcaactgcctgagatacaatggctccctcaacccgtcagcaatcccggggaaataccgaactccctgagaatcagccccgatcgggagacgaaacggagactactggaaccgaacaaacggaaccacagacccagggaaatataaccaaccctcccgaggtaaccgcggaaactacccgactcatctaagaaaggatccgggtcctcgaagccgaagcggtacttcaggagagacttattactaccgaagaacttatcgaagcaaaccagagaaagctcgagagttaccaaagaggaaagaagtcgaaccgacctaggaacgaaggtgattcgacatcggagagcgagcgcagtcagaagggcgagatcaaaagagacgtcgcgatattcgaaaagaactatagtatcaaaaacagagaaaactggctaaacgacctcgatgcccttttcgaaggagccccgaagaaatacatttcgggaaaacagaaggttttagccgctacaaatttcctctgcacagactacaaaggaaaatgggtgattcataagcggaactaccccggagacgcaagaaactgggaagcatttaaggattagaccaaaactctactccaaaattcccacaatattgtcacagatatcttagtcttattcaataaggcagagatacacccataccaagacccaggcgtcttcgaaacctacctcgaatcgctagagcgtcacctactagaaaccaccgaagagcagaaagcacaaaccctctttataaaattatagaaacctctcagagacgtaatgatcacatctagcaacggtaccttaccgaagactagaggtaaaatatcgaaactagcatctaccctgttccatgtccattttccaccttccaaaagaaaggaccaatcacaacagccccagtccaagaaacgaaaagaaaaccctaccaaaataacctcgaatcggtcccaatccggctcctctactaccaacccgaccactttcagaggaggacgcagaggcaatcgcggcagaggaaggggttaacacaggggtcgtggacgtaggggacaccgaaatgcaaaatcaaatacctcgggagcaaacgctacctcaacaatagactaaggaaacagcaccgaagctgccgcgacaggggcatatttcttttgtggagataagaatcactgggcaaatgaatgtccccagaaagctatcgtctaaacattagtttaaacgataaaagaaagcaaatcccaagcatcagggaaagtaaaagagctagagtaaatcccagtacctcagctcaatatccactcattaggactgctacacgcttacatatgccgattacccttaaaaacagcgacgaaacacatgtggacctagacactagcgcggaatatgatatagttagcgaagaattcgctcacaaccaaaagcttcctcctaccccattatcctctctatcactaagaggaattgccctagaaaggctacgtacacacagtatatactaggtcaaattcactatcaaagattccaggggtaccaaaaaagtcgtgaaacggccatatattggtatcgaaagagacccacgtctagagggaagccctatactcctatccagaacatttattaacgaattcgatatcatcctacaaccgagtatagatcactagtggttcggagtcaaggctttcgagttaatgaatccacacaagtttacaaaaacatcacggaatatagctatcatttataccttagttaaaatgccggaagaaatctagttaccagacaaagatagtaaccatcctcacctcaatatatctaagattccacctaaattagaggcgtatcttaatatattcgaccacaaaaaggcagggactctcccgcgaaccaagtcatccgaccatacaattgagaccgaagaaggtaaaacccctccttatagaccaatctatcctctctctaggacagagcttaaagaattgtgggcttaccttatggataatatcaaaaagaagcgaatctaaccattaaaaagtcctgcgggcacaccgatcctttttataccaaagaaggacggaggtctacgtctttatatagactaccaaggcctcaatcgcattacgatcaagaatcgctacccattacccctcatttcggaaatcctagattgtctctctggagtaaaatactttagcaaagtcgatatcaaggacatatactaccggattcgactacaagaaggtgacgaatggaagacagctttctatactagatatggccattttgaatatatagttataccattcggcttatcgaacgtaccagccaccttctaaagctacattcatatagcgttaggtaagctagtcgacgtcgtttatatagtatatctagacaatatcttggtatttacgctcaatcgcgaaagctataccaaagcgctataacaggtttttaagcaactaagaaaagcagagctctatattaaaccttccaaatgtactttctatcaaagggaagttaaattcctaggctttattgtgaatagagatagggtgaaaatagacccagatcgcatccgagtcgtctaagaatagaaagagccttaaagctaccataatatccaagtattcttaggattttataacttctatcggcactttatcaaaggatatttatacatttccttacccctgacatccatattaaaagggagtaaaaatggaaagaaaccaggccaggtcgcgctaaccggtgccgaattggtagcatttcgcaacctaaaagaggcgttcaagtccacatctctcctttaccatttcaatcctaagcaacccattcggttagaaaccgacgcctcaaataaaggaataggaggtattctcttacaaccagacctagaaggacgatagcacccagttgccttttagttaagaaagttctcaggcgcagaattaaactatacaacaccggatcaagaactattcgctatcgtacactcctttcaatactagagacactaccttaatagcagcaagtataccattgaagttctttctaatcatgctaatttacacacgtttataacctaacagaaactcaatggaagacaagcatattagtatatatttcttataccttttgactttattataaagcataggctaggcaagacaaaccctgtagataggctatctagaattctaaattccaagcaagcagctctaggaatggaattaatgaccctaattcaaaatcgaattataggcaaggagctcccgatccaaagtcagatcgaggatactaccactcttataatccaggggattatagggataaaagatctagacgtagatctagagcatgatccaggggaacatgactcaaagcatatatcaaataaacataactcacaatttagattagagcctaaggccgtataggaaagtcctggatccagtgcacctacagggataaatgcaaaacgcatcagcacagaatcagacaattggtctgaatagagaaaactctacaacgatctagatataccattcagtatcgaggatactacaggggtagttatccagtctattagtacagatactaaagacattctccaatgggttactaggcttcaacaagaagaccaagaaacgacctgccgaaaaggggacatttcggcccagaaaccaggcctaaaaggctagggagtcgatacaaccagattactatagtaccgggggcgtatatatatacctaaaaaagaaggcctacatacaaagcttttgtaattacaccataataaacctcttatagggcatttcggccgcgtaagaacagaggagctactaaaacgcaactaccactaggtgaatatacaagaagatattaaaaaatacgtcaagtcttatggagtctaccaaactacacaagcgccaaggtatcgaccctatggtaagctcgaatcgttaccaattctatctaggccgtttgccgagttatcaatggattttatcataggattacctcaatcgatctagaaaggtcggatagtagatgccattctggtcattatagatcgcttctcgaagtgatgccttttcttcccagtttcgaccacaatagacactacagaattagccgagctattccatcaagaggttgaactaagatatagaccacccaatggcatcgtatccaaccggggatctgtctttataagcaggttttagtcaaaactatactatctttccaaagttaaactccagtattcgacagcgtttcacctacaaaccgatagttaaacagaaaggatgaaccaaaccctcaaacactacctaaggtattttattaataagtaacagaaattgtagccagcacttcttcattcagctaagtatacttacaataatatggttaatacaaccacaagcatatctccattccaggtactcctaggttttaatcctaatttctaaattcacggtaaggacgcctgcgttaagagggaggcgccagctacgctacacagatttgaaaaactgaataagctgcgcgggaagctatagatatcatggcgaaaagctaccaaagcacaggcgaatcagtataacaaacgccatcaagcaatatccttcaagaagaacgaccttatgaccctatctaccaaaaacctactgttaaaagaaggaactaccaaaaagctatctcctcaatagatcggaccattcagaattttagaatatatcagaaagcaggcgtaccacctcctactcccagacaaatatactgcgattcataacgttttccctatctccctcctccaaccataggaataaagagaaggggaaccagaacaactactactaccagaactagcagataataacaaataggaggtcgaagaggttaaagatgaccacgttttcgaggacaaattacattatctagtcaaatggtagggctagccttctaaatacaaccaataggtcccagagagtataataaccaacataccgaagcttattacaaaatacaaaaaggcacaaaagacgcaaaagaaatcaacctaagcagtatctacaccaggccgctatcgaatcatcatagctacagtatccaatcgccataaggaaagacagtcatacactcctcgagcattacctccacatccggatcatcaagcaactccactgcctcagagcaagtttattagaatgaaatcacagcacctatccaagcagtaagcgactcctccgaattcataagtcagggtcgttccaaggcctataccgcaaggatatcccagggataaacggcagcacaagtatcccggtcacctataggatactcagcaacaaaggccgcatagttatcacaaacagactgggaagagatattagcgaaactatcatagagaagaccagattcgccccaatacttacagtaggaatatacatcccactcagactatggttcctacaatacactctcacaagggtatcaaaagccgcgaccagatcgcgaactatatccgcaactacctcgataaactcagaagggaaaaggaactgtacttctttatcatccttatccaatacacccacagctactctaagggtccttctggtcattaaccaaaattactccgcccaggaaagaactgccagcaactagaaacaattcccctcaataccagcaggaacctagttctaaggttagtacaagttctatcagaacgcagccgaaacagctaagaagatataccgaatcacacacgtagtacactttcgaacaacatgcgcaagatttgctatacagcgcatcgatatagcactagatcaccaaagggaaacaataatcatccttatccttatcccaatctcagttagacactcgcatatataatagacaccaggcctaccgacgaagaatagggtttataatggttttccaacgcattcccttcgaaccagcagtctttgccattacactaaggatttagtaccgttatacaggtaaaacgatcagaagaaggggtctagaaatcatagaaaagcagaagggaaaaggtagtaattatactataactacaatcacccactgcaaatccatcaaaggaatacaattatatcccaaatgacagctgtcgcaaacatgtttctttatgcaaatgcctataaagaacatggctatagaggccagattcacacctctttaaatcccctaccaccagaaatcctgcacgaaaagctattcccagacattctctatattatagaaaaatatcaatatcctacagaacacagtcttcacgaaacgtgtacattctggcagagaatcagtatagatcggaagcgaattccaggagtctatacaatgcctctctactgaaaagataacgtatacccatatattagtggtcttgaagaaatataataattatatagccacccttctaaaagaagcataaaacacggagtatataccttatcggtcaccttcttttcaaattgttatacaccaccttatcttctttaatatatctaccgctttactttctttattatggaaactccctgatacctccccgattctttatcttttcgtcccttaacgtttctgtttgcacatagatgaggacatccgcgcagggagggggagataattgtaacggataaaggtctgtataagagggaaacacatataaacctgcataggctcaggaaggaatatctttgtcatcatatatctgtttcgatgtcgatccgtgaggggttcgtcatatgaatataggcagatagatttccttatagcttaggaccccccaggggcccctccgagactggcaagaattagtcttggcacatcatcaatacattgtgttccctccacaaagccctttgtatcttacccggttgacaggccgtacacctgcataacgtatacctttacacgcggcgagggctcctttgtcgatggagtatcgcgaccctagtacctagcctacggataactcaaccgcttcctatactaggaaatcctgacctctataacgataatgctcgagtaggttagggaagcttcgatgggcaacctagtgtatcgtctctactaacgactcggcggaagagggctcctatttaaggcgttggatgttgactaacttggccttattgcttcggagacgggcgaggaagattagccgcccgaaaattcgaacggtcgactcgtaggtcagctatagatcttcgtcgacttatccgatctttggtactacgtttggattctttcgctaaatgggagcgggacgagctaagggggatcctacggtgaatgtttcgggctaggagtcggataggtatagccgtgaacgagaggcctattcgatttcgagatctaaatcgcgctttcgctttagactaagccatatagtccgtggtcgaacggggtgagcctgattggagtctattataaaggcgccgtatggagagggttgctagtttagtgatatatacttaggttatggtgcgatcactttatactccagcgtctacaaatctgatccggggcacgtctactcgagagggaactgaaatgagcgggcgtatttgattctccggccgtccgatattcatacggtcggcagaagtttgcgcgactgcttgcacagcgatggcaactctttgtgcgggtcgttcaaggcctgtcctcgtcacatgttgacagaattataatctgcaaccatccaacgacacaagaaatagggagggtgcaccatacatggtggttcgtggacatgaaagaaacagccaaaatgcccctagctcggacgatgccggagtactatatcattgggccaacatcttgaatttgctacgtagtaggtacacacgcgacaagactccaacaaacgacgcattgctcttggcatggatgatttaggattgacgttgattgaatacaacaaatgcgcactggaaggaggcgggatatcgctgcatgcccggattttccctcagtatcgttacctcactccctcaccaaaccatgcgtgccacaccccactactggaatcgttctggaggctgtcccctccgcgccgaccgacggagctcagataggtcagacgaccccgaagggtcggtttgttgtgcaagtcgagctgaccgtcgttgagtcgatacaattggttggctttttaccgctaacccatccgtggccgagcgacccggagaggacctatccacggaacggtcaacggaacgggttgatcgatggatttgttgctcggaagacaccgattcgtcgatgcgtgtttcgccactagggccgtctgtcctcaaggagcaaatgaacgcgtcaaaagctccattatgtttactgcttttcggtcagcgacagcacacaagacaccatcaaagagggccaattgacgtaccatattggacaagggggattattctcaggtggggagaatccgagccaagtttccatacaactcaaatggacaaaaaaaacgcatcttccacacttcagaactacagggtcggcttgggcttcctgaaggcagatcaggcaattcatgtgttctgagacgggcaaatcattgagactcttgagccgcaatgagtgcgatccgcgttcaatagaataagtggctggacgggttgaggaaattcgccagggtacattattctcccgcagcatatcgcgtgtgacatgtcgtctggtgatacgggttgtctccggtcgcacaggcgcagccactggtatgtaaggtatattccggacagccgcatcataccactgttgtccgagttggtcggcctggcgtgtccgatgccaccgccgacataggaagtgggacgcaatgtcgcgcaggatcgggaggtcggaaagatcaaattgccttctagcaagggatttcagcttattgcgaccttcatcaacgtcattcactgtcgggtagagtttgcaatatgtcccgtttttggtgaggccacaacaagtctgctggtgcctgcgaagacccatttcacagatgaccagaggatcccatcgctcctgagatgacggcatgatgagtatagatggttgttgatttggcaagagagctcgagaaaaagagattgatgaagacggtctcttcgaccgcccaagagtatttatattcataaatcataagtctattcttggagtttcccaaataatatacgcaatgctgcctgttgaaacagatacaatgaatggctatgacggcgatatcgctagcacacgctgatcgggataaccagtgggttgtacctacatcccggagcagtcaaccatggccctaggagcagttgagcttgcggcaatcatttactccgaggaagtcaatgaatctccacggaatttagccatgaaattattttcgacgctcattgctctcgttaagactagagccatgacctggcttgatatcacaggagttctacctagtggcttttgaggtacttttgctcaatctaggtattgtactctctacgacgctatataacgggtgtcgtcctctcttgcaaatgtactattttctagttcagctctcttttaatatatatcgggactctatctttcaatcgatactcagctagattgttagaaacccttactatcgactaatatactagggtattagggacaatagaattaaatatcggaacgacgtgctaaagatatctcgtattaatagtgcgatctaattaggcctattccgaggaggctttaatagccttctttatgaattagtccttataggtgcagtaaaatctatattatatacaaaatataggcccgataactcccgagctaagtagtatacctaataatagatttaagaatggattgctaagtttaatcaagcagatattactcctataaccctgaatctaaggatctataatatagactaactggtatagtattatttagctatattatctcccgcggtatctatataacgtgctagattgattcctagaacgccggttacgttagtatttcgaagttagagacgaagatattaggatgatattgtaaaggctaaagaagccctatttaaggctataactaaggtacggctagaatttatcttttaatacgttagattaggttcttatattagaagggctctaaggttatatagtcgctaccgtcggtctcctctccctacaaaatcgatactatacgagtataatattggtagtataatagagtgtatcttccttagtaccttattagccctacttacccttctgcaacttatatacgataaagttgctcgagctattctgtagcgttgtcaatagaatccgctaataagggttacctactatcccgtatatctattattaagaagaacagttaaaaaccatatatatataatagaacgatctatagtacctaccggattgacctacccgattttgaatactccaagtcacccttatcttaattgagattcggagtgggtattatctctagagatagggtagtcgacctccgcgtacggtcatattcgaacgctagtctaaggatactagctaccggtatggcctgcgatatagttaaggtaagggctggttcgaatttatctagtgcccgctctaactctcgcgtgagtgcacgggcacgggataaatactttcgatcttttatcactactaaagaagggtgtactgtatatactatacgcggagaccgagattatagacttctaggaataaacaatagagtagaactagcttcctcttatgtttccttcatcgaagaaataaagcgagttatcatgctatgtacagttccgctcgaaattagtttcaccatttcattctcattggttctttcttaagtcttggccagacccatctcggcctacatctggactagcccatcatttactatcaaataggaaaagggaaattaaatttcgctagctagactaggcctagcattagtaaaactagacgttgagaaggaatcaaagagaagaaattggtgaaactgatttcgagcgcgtctgtagtgcggagttcgatctcgttgacaaacacgggtaaccgcgcgcgcccgcagaaaacccaacggctagcatataggtaatatttacacgttggctgaccattattcaacataacttagctgcccatttctgcgggacctggagcattgcttcccgagctggcatctaccgttgctgcatcctttttaggctcctacgcctccgttttctcgaccacgctgttaagaatgacctcaaatgactccgagcctcgggaaccttcttagataccgtgttctttcagaaaatagtccgttacagctcccatccgctggctagccttataaataagatcagccaatttgctcacttgctctagctcgtcggtgacctacgttagggccttccgcgtagtgtttaggtcttgatcgagctttacctagattttctctgcacgaattgcccgcgaattcactgcggtaagaatacaaagtatttcctatagaagttaggagagtcttatttaaggtacttgaatggtattatactgactagagtatctatagcttagctaattgagcttaaggaaaaataagtattactaggtaggtcctaaaaccctgatggtcgaatgaattaagtcctatagactcggtttatctagaggacaagcgaattagtacagttatactaccttagtcgatcaggcgactaaggcattgttaggttgagaacgttgatttctgcgggctagggcagcctttacgttgaagactagatcgctgaacggatccgaaaagaacacgctgttgtctccccgagtaaggctaaataacaagtcgacttggcgaaataaccgtcaccgagacacgagaagaagctacggcgagattatcgatggcgcagatgactataatcttgttcatgccaatatacatataggtctatggagcagcgattgttagtttgtcatagcgcacacagctgtccctaggcacagatagattactagatatcattttagttctactatatctatagtcctttctttacttgtgagaccatacctacactcctatcaagaatcctaaaaaggatgggactggaggtcatatacatcgttgttgtccgccactctcgtcaaggcgaccgacggattttccaatcctcttttcctcgagattactagacggtgagtggaatactggaatgtgaattttggctactaacttttactaggatgtcactgtgaccgttgaagatgaacaaagcccgtcagtagcctcaccgaactgactcgcagcttactagcggtggcatacagtactccatgcaagggaaatcggtggtggaatggccctggatggtgtacaggacttgaaggatgaccgttttaagaacatggtcaatatagttgaagaacttccaattataagtctgcatgacacatgcacatgtatcgtttaagaagactgtgacggcggggtgaccgtgcggtaaagtaactgccgtagagatatcgcagcattagatggcaggtctctctgaagtagacctaatagaaataattcttggagacgatcgaagaacgtgctggcactttcgttgaaggcttcttcaacaaccaccgacttgaataaccaccgacttgaataaccaccgacttgaataaccaccgacttgaataaccaccgacttccgctttccttatcgatgtgctttttaaacgttctcacttgaacgcttgtgcttaaacgttcttaaaagtgctttgtttaaccgttctcacttgaacgttctcatttaaacgcttgtgcttaaacgtgctttgtttaaacgttctcacttaaacgttctcatttaaacgtttgtgcttaaacgtgcttaaacgtgctttgtttaaccgttctcacttgaacgttctcatttaaacgcttgtgcttaaacgtgcttaaacgtgcttgaacgtgctttgtttaaccgttctcacttgaacgttatggtagacaaagaactcgcgttccccgagcctcaaaatccgaactaatttggcccacgtagatcactagctaagcgaagttacgagggctgtcggcccatttctatgggatatccgttgcgctaaacctttcagtcaccaacggcgcgtcaaactccacgcacattggataaagcctgtttcttggcggtcattgtgatttctcatactagcgccgaaaatccttcggtcggtcggtcggtcccgcaatgcttgtggttatgctccattcttggaagttcattaattgattgcagggatcgatccagagctcggatttatgtcctcgccagccagctagttcatagctagtgtataccagatacgaggccaaagcgcatgctaccttgttgtaattattccatcgaagcaaatattaacaaaggtggtcagtcttggaccttgggctggcaaaagaaatagtctcaatataaaatcaaaaatttgtccgatacagtagtactgtactatacagcgattttcgaaattaatttaccgctcgagcacacgcactttgtttctcggctcgtacccgaaacgggcgttgtctttattcagataagtggtaacataacatccactgataggctaggtttacttacgactactcttaattgggaaaggcggcgttttgggtacgaaccgggaaacaaagtatgagtgtctgaggggtactgtaaactgttttcgaaaatcgctgtattgtagttcgtaggaaccattttgtgttattcggctttcctgtcggcgatactcctgcaggatttgtccatcgggtgatagatcacatgcttcattcgtacgaccgcctgggtgggtccatggcttgctacaaggttagtagctagaatatcagctagcgggtcatttcggggctctctgtacagtagaatttagcatcatttcaaaccccgcctttaacctggggtagggtatgaagtctagtgatggtgttttgtgcgcggtagcgcagacgcaggtgttaggcaacacatgtgcttctacgtcaagtgtgattgtttccactgttcgaaacgaagataggacgcggataagagcagctcgttgcacggtgcagaggtatcgtaggtgggtcttgtctcgaagggaatcgtgctagacggtcgaggcgtagtcgacgaccagtgtgacgcacgttcagtttacatgtaagtagagaagcgttgtcggaaagtatacaagaggttgcaaggaccaaagcatgaagccgcgacacgatatgagagaatgaacagccagggaagagtatgctgctttcactatgcaatgactatgatctaaactggagatagggcggtggaggcccagacagcctttcaatgacaggctgtcgctaactcggctttcttcgtctcaggatctcagatgagacattagaatgcaggacaacccatcaattccatgaagtacaagctcaatgtgtagtcccaatcatggttgcttcgctatccttgcctccaatttccatactgggcaagttcgccgaatccgctgccaaagctagcatgggagccgaaagaaattcaacatgaaaagggccctggacgaatttacaagccaagaacaagatacagccgagagtgggcaaaatagtgaatgctggcagtcgaattatttatccaggacatctgaatactctcaaatcgaatactaccttttaatcacaaccataagtaaacgctacaaagatgtacaaacaccacaaatgaaagcctcaacgatgcataaagatggtggcaaacataaagaggaaagacatggtcaattgtcggtcttccaactgtgatggaagtgttggcccgatagtcgatttacacgaagttgttggcccagggaccgtttgttcactcatacccattaacactgtttatcagcgagtcatgttgaaacaaccgttaaacttagtttggcgcctacgtagagggctggaaccatgcaaatcctggctctttgggttgctttcctccctagttccacattcaatgcgactttaaagctcatactttcccgcttttgccactgtatctcagacgaccttttttgtctccgtaaacactatccgttgaaatcattctttcccgggaatcgttgcccgccacaccgaagatgccacctacgcggaagcccgcttcaaaggctcgtcaacgggcccctggtctgtccacttctgccagtcgcattgcacgtcccttgctagctgataatgagactaatcaccgatcctccacccgacaagaacagctgcgggaaacgttcgtgagtgtcccttgtctgtaaagccaaccataactaacttcggctcaaaggcaacaacgtcctcttcacaagcaaagaagagagagcaagaggaatggaacgaaacccatcgaggctgtctggatatcctgggcgatgccgatgatgactaccaaaagctctccgcacaggtgatgcaacaacggcaagaagctcagcagaagctgcagcagctccgcagtgagcacctccaagcgacagccacaaaccggcagcttgtcacggagaggcaaaaggccctgcatgagaagcaacagtgcctcggcaaaatccagcggctcgaaacggatattgctcagttgaaacagcagctcgagacagccagcgaccagaccacggagcaaatgatatcgcaaggaatagagagcgaattagagacggctcacggggatctgatgggtgtagccacccgactctggaagaagatccaagaacagcaaaacaaacgctttggtcttgaatttccgcaaagtgatgtgatgcaaccacccacttggacgaactcgaatggacaatttggagcactggacccgaacacgctaccgggccctcccatgacgaacgcattttcgttggatacccaacagacgcagacgatgccccaaatcaaccagtatggagctctttcttgagaagcgtcaggcattagtgccgttggagcgcgttatcgtcaatcgttcatgggtcgtgtaaactaatcaagtatcgaagtctccgcggcctcttttgtctattgactgggaggattatctcagcgaaacaatgaaatatgaaataaaatccaagtagttctcttaaggtcgtgagtgtatgcaatatcgagttggtctacttatcttggtgattggccagcacacgtgtattatgtcatccaacggtccctcgctagattcaatatggtttagtggtactgtaatcatttatcattctgcttcctcggcacggccctgttccgggaggggcggttcgtgctcgggccgccaaagtccctacataacgcccaagtatgttttggacttgcctattcccccattgttatggtgtcaatacttgacgaattgagtatttttgattttcctaggctgctctcattgaatggtgacgtgagaaaaccagcatccctattttcacatgtcacaagtggtgctctggaccgggaagcccaaacccacccatcatttagcgcccgcgtgcatggtggcgttaggaggctggtagatcaggggaaagataccattttcattttatgcttcgatcggcgcacactagtgtgatgggcgaggaaagtaaaagaaaaacaatttgagaaagataataataataataataatatgaaaggttacgcgaggcaacgatcgactgctgtggtcatttcctcttccgcttgtactgtaaccctgtagcaccgtcgctgagactgatatttattgattgctttgtgcggacctaccctcgaaactaatcctgcgggtctgtgtatcgagttgatgtcaaaaatatgctattttcgtttccccatccactaatcgcgcaaggcagatgatctgtcttctccagatctggtttcatcacatgccggcagtccaagaatagctataactactgttcgacatgttcgtccaccgtttttatcgggcgatcaacgttcgattcggatgccgtagccaccgcccggcctatatatcttccgtactgcctgatttgtctctagagctatcccgctagtcctatttcttttctaacaaatcactaatttcacagtttcgcaatgattccagacccctctcctggcatcacagaccggggtcatcccaagtttcggcccacacagtgttccctttcccttatccctcgaagtcaaactcttctgacatacggggcagataggacaaagaacaattgggatctacgtcaaagaccagcagtaacgctttgagggaaagatccgcatatatcaaatcaatctcaatctcagcgacggtgtcccaggttgcagggggaagaggggataaatgaccacagcagtcgatctttgccgggcgtaaccttcttttgattttaattttctttcagcctcctaacgccaccatgcatgtggcgctaaacgtggctagcgcgtaccataaaccagaaatgggtgggtctgggcttgtcggtctagagcaccgctcgtgacatgtgaaaaattagggatgctggttatctcacgacttcattcaatgagagagcagcgtaggaaagcattactcaattccatcaggtattggcaccacatcattgaggtaatagggcagctcaaaacatactacttcggcgttatgcagactttgggctgggagaccacgatagcatcttcctcgacatcaataacgacatggtagactcaccacaaattatggttttatggtagaccaagtgggccatatcggaaatgaggttgcaagttatgcttttttttcaatccttgactggtgtcaccgatatgctctctatagtggcccaaaacggaaggcgagattgctcctgagacgcgaaccgttgtgatcggacagatgtgccgcagtcatcctgcattagggcgaacctagtaagtctgggtacagtagaaaaatacagcatttccgattcaaaattacctcgggtggagctagcggatttctaaattaaatactctccgacactatcttactgtaacgatcggcaatgatttggaatcatgacttgctcaaatataacaatatatttctatggattgagaatgatggaatgtttgattccagtagagcagaagctgtaatatcgctgtgatgattaagccagccgttaggaactgggatagtgggtggtattcagcctgaaatgcagcacaaaaaagcgaagggagagtttatagcaaactaccatatttgacaccaacaaatacaatgttagcttgccgtgatagccggcgatgtcgatgacgatctcactggtagggggaatggccaatggcccgcgcattcttgttaacacgccggcgtcatcttatggcgaagctgatcaggtaggcgctctacgggaggatatgctgcaaaggatggatcatggaccgcagtgtgaagagaattggcttcttatgccatgcatgcagatcttttgctctatcgctttgtccgctgcgcctttacttccgctctcgattctcggattaggtagcatggaactgcttgtcacattgcggctcaatccgtggaaaacaatcgcatcactgtgtcggcctcttggggtgggctgcttttcgatccccgccgacggtatccttgcccttgttcctacccgcgttctgccgtaactctttcacttcctcttctaggataacgagtctctcccccagggcctgcagagcctgctgcgtgtttttattacagtcgcgctggaccttggcatattcttccatacctctgagaagtcacgtcagcttcgctctaacagtcataagcaaggaaaaaccatgtcgatcggatgtggcactgactcttggcgtagatctagactatcgaatctgaatcagcatggatctcgaaatttcatctatacaagggcaatatattgagacgtactcggacagcatcgtaaaagccatcatgatcgagccctcggggggatctccagaagattggtccttgactgagccctgctcatgctcggccccttcatcggcctccatagcccagtcattttggtcgtcgtcactgccttcgtccatcggggtgatctcctcttcggaatcagattgaccatctgcttcgtgagtttgatagttcctgccggaagaagttgacctgggaggactccatacgttccttgacctatcaggttggggtgcagaccggcataatcgactccggtaactcgttgagtccgtgttgggaaggtagtcgcctgcagtgaccatatctgtcttccaggcttgacgagttgattacgaattagatttagagtgaaaaactaaattgatatgggagcctagactcctttataagtcaaatcaggcagcatatcgcaactgagcctggagcaactaacagggatttatccctgcaaaggcaattgcttttgagaagcaccaatagaacaaaacgtagcaccaccccacgtcgattgctagaacagtagttcaccggttaattttgatccgtgatcgaggacatgtattgcttgagacactagttgatcatgtgctgtattatatgctctggggcttgtctccaacgattctacctagctagccttccccgcttggaagctgacgcgaggaagcaataaaatgatgtattaattttatgttggttgtgttggttgtgttggttgtgttggttgtgttggttgtgttggttgtgttggttatgttggttgtgttggtttgggttaattaaagttaccccaatatagccaagcacataccagaaaataacttgatggcgggaggcaggtttccttccatgaacaatataaattcataccctcgtataaatgaggaactaagatcggctgcctggagggtgaacacttttggcttgcacggcgctcgaccaagaaagaccatagctgaggagatggcgaaatagattaacaggtagattggaattatgtcaaatgcaagtggtgaccggggtatggcatctatgaatcaccgttgatctccttgagctcgattccacatagaatgtctccacaggcaccaacccccgatagtttggaagtgttgcctgtttattatgcttctattgcgtagaaataacggtggcaggttctctttcctaatctataagtcacccggctttgtacatggccagtcatagcaatgtgaggctgtggccacaacattggaagggacgactgcgttatggaacttctgccagaattgagcagcgtatactgggagcatttccaaccttctcaagacatgctatctttcgtccttgaacaatctcagtcacatctcaaagcactggcgggacgtgaaagcttcgcaaggtttttagacgtctcacttataagtgacatactagcaaagagaacagaagtgatctttgaagcaccgagtccttgcgtatttcgatctgacaaggacgcagccggtgccaatatcagctggctcgacgttgtcaacgaaaagaactatcaggccgaacatcaaggcaatggtatttaccattttcacatgcgagacaagggcgtgattgttcaattatctaccttccaacacaatatgattctttcgggattgcctcggcagctggtgtaaccttggtcatacgagaaagatgtgcagatggagttgtgttccctagccctggcggcggaaatgacttcggttatgaaccaacttgcgtcggaaggtaggtacactcaaagtatggttgaccctactcactcgctcactccatctcgcagccattaaagtaaacaacactgtgctcgaggagataggaaaaagagtgcaggtacttcgccacttcccacagccaggtcaaagatcagcagcatcatcctttcccgagcgtgatctggtgtcggtcgagtcgcccgcgattctttcgacagctggggctgatacttactttctcgatgggttcgctgtcgagactcaagacccaaaagttcaaggcagtaccaaaaggcgcagtgctacaaaacggagctgtaagtttgggaccgagaaaaacacgaagcaacgatccccagaaacaggactgacaatatgaacgtgccagcctccaaaaacaagctttggcctccccacgtgctgaagcagcttccaggatggttcgaagaccaagttcagagaaatttttcgcaagacgagattgcccaacacttcgaagagaaattcgagcaaaaaaggacctttaatgctcttgaggccatgttgtataagctaattggaaagagtccctataggaagcgcgggaaacggtcctcggtgtcctcgagacctcgtcagtcttcaccacctcatcattcgtcaagttcattagacttgtttgaacgaaagatattgcggtcgaatatagatgtacacacattacatctagccccaagcattttaccatacattgttgcggataacagcgaagatgagaatcctgtcgcccacccagatgctcaaccgattgacttaaccccagagtctagcaactcagaggtagtacttgaatatggtcttgtaaatggagagtcaggatgcttgggtgcatcccaaggacacatgcttcagccaggtcaatgccccgagacggaagaaccgtcaaaagacctcccagacgtttcagacatgatggctgaagccccctggcagttggaagacccagatattgataactctattcatgcgattgaggccgatttgaggaggggtggttctcatacacctcaagggcctcccgtcgaagttgcaccaatgcagatgaatcagtcagctttgtcgcaaggcagccgaccagacaacacttctgggcagggccttgtagatccattgaatagggtctcattgaatgagaacacccaacatgaacctgaagacttcttcgatgcgtccagcctcgccagaacaaccaccccatctcaaacttctcagccaaaccgccatggcagctcgactgaggaccatcctctgaattgcggaaacagtgggacatccgccaatttcatcgaaggaggtttggccgaggaagaaatcgtacgaaggtgtcttcttgagagatctcaatcacagacggtgcgacttcatcgtccatggaggatcgaggttgtgaaccaactgccgcaatggctcatgacacggaagcatctatcaaaggacagactggaagttgagttcctaagggacttcaaacactatcgaacatcatctgccatcagtgctgcttgtcgcaaaaaaagaaaggcagaagcccgtcagaatattgcaccctcaagctccagcccgattttacaacctcgggccgtctctgtggcatctgacgctattgaaacatcacgtatgccgaacaccatcgcctcacaaggcacgtctagcttgaatccatcctacttgtcgagcaaggagatgagtgctcctgagaactcaccgttggaacggtatccacaacggactcagcagcagattccagaggatagagagggatctttctccaatcattcttttttctcgcatggcgaccaagaggcagtagatactatcccgcctgcttccgttgcctcgtcatgcgctcctgcgcaaacgccggtttcgcaacacgtctgggttgccgacgatattcttggcatggacaatccgaacgacccttccctagctcaatctatagcagtcaatgatgggaatgctctccaaactagactaaacgtggagagcaccactccacaagctcagttggaaagggggtaccatggagctctgaatgacggggaaagaggccggcaaacatcaacaccacctgaagtgccagtgggacaggaatcgaatgaccagaacggggcgcgaagaccaccccccaagggtaagtctgtctcctctccttagccagccacgctttcagtcccttgcttgtaacgtgtcagacttatccaactcattgagcgcctggcttctgactcacactcattcatatactttttgtccgcacactcatactgactaactttcttgaagcgtttggagaaggacaggcatggcggcatgaccgaaaaatggcagacagcacacttgaagccaccggggaccagtcgtatcttcccgccgttgacacccgccgcccgcaactggaaatatctccaaatctacaaaccacaccgcaggtccaagcaaaacccgtgaccgtgccatccgcgaataactctcggacctttcacataacaaagcaaatccaggatgattcctctggcttccaggcctcatcccctggagtagacttccgcagagcccataaagcccaaagcccaacccagcccaacccccaaatgggttgggtttgggcccaattctcgggcccaccgatgggccgtgggcctatagtaagggcccatgaggcttttgggggggcccattgggccccaaacagtgcaaacatgccaattcttggcatttatataagttatgtagaatttcctagtatttttgagtatttaagttaccgtctgaggcccctaattgactgagttctcataagaattgactgaaatcactgtttaataagattgataagattaactgatgagatcgattgattagatattagtggaggctaaactatctacgtgaatctaataacgtttatataaatcatccttaatatacttcctcttcctccccgatgtccgtacctaagacggtgcagtagtgaatctaatagtagaatcgttattatcaaccctatcgttatcgttatcgtcaatatcgatcagatccctagacctagaactaggtccatcaccctgctctttagtgttactgatctcttcagtatcgatattatccggtttcttaatactttattctcttaatacgttaatcttattagataagaggtcttctacttgtgagacccctaggtatggaatgcctgagggaatgctgtatgtaatggaggatcgggaaatagagatagtagtatacgcagtggtatattagaaactaatagctgcttctccaaagaagcaccatgcgaggataatatacaggttgtgggtcacatgattaaagggggctgtgcaggcagcacacacggctcctgcccagtccacagttccccacgtaccctgacaggtgcaatacctcaggcatcagccttcttagtactagggtcctgacactactacctcctttgcctcctagatattaaggttaaaccttaatatatagagaaatagtatcagctctttaatagtattagaatttagttaaccgcggcgatagtagtagatatcttgtatagtattgaaaagacgttctatcctagcgcctgttatagggattataaggatatcccttataagtatagtaatagctggaaaacggtattgattctctttctaaaaggagagcggttctaaatcagttatatctatataaaattagtattaagtggagagatggttataaagataaatatagagatagctatgatataattaaaagggtttaacttactactatcgagatactacgttatcttattatctatgattaggcctagcgttactttggagtgaggcttctattttcgagctaagttacgaagcagtgatcttaatgccgatctagaggaaggctcttataggccttaggcactagtaagacgttcctagataggtataagggtatctcggaacgctactcgatactgattatagagttctttagtatctgcctagttattagaaagaaagaactagaatctactatctagtaatagcattgtacaaactgtatagatatgcctacgtattttattagtctctttgtagtagttacgtaatttagtatagctagctttgagagagctaagtatctactgtttctaaaggaccctctttcgccttagctgcgttattaatctcttaagatacttaaagagcctattgtagattaaaaagataagatacgatattacctctcggctctttaaaagggtaagggtaaaattaaagaacggcttagtaagatatagaaggtagttaatttggcgctattgattattattaagtacgaagtctttatagttaaactaatcatagtactttataataaagacgtagagtctctttacccggcgtaatattagaaacgttgaattctatcgagttctaatatcctagatcggtataagcccttaccctaggggttagatagtaataaaggagtcccgacgctaggagctcccgcggatataaagagtaagataccgtactttttttagggtatacaagatatcttacttcttagatgccgcgtttacctttataagggtgaattgagtgtctatctatatcttagtagtattatttagtaggactacttttaaacgattaagcagttagtttaaactcaattagattatataggtaagataggggattcggataatattagtattattaggtaaagactattaaagagtattaactagagtcttattatttaatacgttgttagtagttaatccaaagactcggtacttaataccgtacttagtaagcgtctttataagtatatcacttagatttatacccgaatacgtcctataaaggggtttaaagccgagtagtacctcgcagtagacctagtcggcgtcgataaaatagctagtaatagctataaatacgtatctaaatagagatatctaacagtctaatacaactgagatcttcgtatactctagaagtatcctaagtatatcttactactaatctttgatactagtagatagccgacgtcgaactgtattagcggaaggaacgttcggaaggcttagggcggattgggctcttataataaggcgacgaaaggttagattctcaacgagattaaatagaagccggttaattataataaattgtaggattttattatcctatacctcttacgagaaaggttcttcggtcgtatcgccctagtttaaatactagttagtagtattgatccttaaaggataatatgtctttatatactatttaaagaaacctcgttattctatccctctgccggtgtctacttacagccctttaataggaagaagtattaatatggcgaattatcgttatcgtactataacgactatctttccttaagctcttaccttatttagccccctccttcctagtagcgtaagggtatttaagaattatagagtatttcttatatataaccttcgcggtactatagatagagtgtgtgacttggttaaattccttctagatcttcgcccagctatactacgagtcctaattaatcttactccgagatctatagtcagtctacagccactagttgacctaatcgttatagagtatcgcgttataaaggaaatactggcctctgctaggaccgatacattagaatcgtttaaaaggatctagagcgatagacgaaggaatagacggctaaacgaacgagaagctattaacctactgagaggtagacggggtagctaggtagatagaaggcgtatcgaaagataagtcgtctagcttagagtcgaatagacttaactaaaaggatctaaactcctagctttacgatataattagtgatagtcaatagattcagagttatataattagcttataggtaatggctttaagggaatcagggctagggaggaaaaactaacctaccttcttagtaagagaactatcgacgcggtaggcaaataaaggatataaatagaggattatactctatagtgctagtcaacattaaaacggagggtcgcaatactagtatctcattagctagataatatatatttagtggattcggcctatctaaagcctaaggaagcctatagataacctatctccccgcctattttacaatttgttcgtccaaaacatttcacccaatagctcgtaagatatctttaagcttctcttacctccggaatagctagaatatcacggtattgtaaaaacagacgtcgatagtaagatattagctatcttttagtataagattcaacgctataaacctacaatttatagatttgactagactgcggcacgatccacaatatccgtggatatccacaatccatatccgcaaactgcggatatggatattttttgatatccaagatccgcagccttgcggatttggatatggaccttatatccattggatatctgcggatatccaatggatatcaaacaatacaaacatgcctagactcgtgacctcaaggggtgtgcattattattatacattcctatgtatttttcgtgtaatacttggtactcgaggttattgaatattaccaggtaaaccgtaagtataatttctgaccttagtcagaaattatgggtagaaggtcaagtactgttctactcacagtagtatacaattggaatctctgaccatggtcagaaattcagtctatacattttttagggggtttatgaatttaaatcttctaggccctatttactattcatagatctaactggaagccatctggtaaccttggctgttttcgaatctaccctgaacggcctagcatactcccatcgaccggcatctctagaagcttatcatcctcttcaacagcctcgcatagtcgtttttgaggttattttccttttacccgtctacgtcgctcagcactatcattatccgagtcattatcaccgctctcagtatactgggtagcctcgagtccagtctcttgatcctcctccttattatcactgataggctccaagacctcaagctgtggtaatgatctccgggtttgatctagcaaagcagcttcaccttaggatagagtgatagcccgacagttatcctatctagcagagaaatatagcctactactaaacagctagttcggtagacgaccgggtaggactaccgagtaagctctactagtactatctagtgcgatcgataaagcctagtataagtagactgcggcacgatccacaatatccgcggatatccacaatccatatccgcaaactgcggatatggatattttttgatatccaagatccgcagccttgcggatttggatatggaccttatatccattggatatctgcggatatccaatggatatcaaacaatacaaacatgcctagactcgtgacctcaagggatgtgcattattattatacattcctgtgtatttttcgtgtaatacttggtactcgaggttattgaatatcaccaggtaaaccgtaagtataatttctgacctcggtcagaaattatgggtagaaggtaaagtactgttctactcacagtagtatacaattggaatctctgaccatagtcagaaattcagtctatacattttttagggggtttatgaatttgaatcttctaggccctatttactattcatagatctaactggaagccatctggtaaccttggctgttttcgaatctaccctgaacggcctagcatactcccatcgaccggcatctctagaagcttatcatcctcttcaacagcctcgcatagtcgtttttgaggttattttccttttacccgtctacgtcgctcagcactatcattatccgagtcattatcaccgctctcagtatactgggtagcctcgagtccagtctcttgatcctcctccttgttatcactgataggctccaagacctcaagctgtggtaatgatctccgggtttaatctagcaaagtagcttcaccttaggatagatactctttaataatccctagctcctcttaccgaagatcaaagttagtagtaaactgatatagcattaggccacagattatactcggcttcaattgaccataacggtaataacagatatcacaagcacagttgaatagtcgtttaataccagtaccactagcagggatagatagaatgtcccttactatcctagctagggtcaggaagctcttctcatattccttctagaaaagtcgaggtttctatcgctcaattccacgagtaagatattgtgcaatctcgtcgttatctagttttataagctcttctaatagctggttctgggatacacaagtaatatcaagatcacagttatcattcttattaatagctactccagaagtctctagtgctactaggtcattagtatcataggtaagcatcttcctatatcgattaaactctcggcttaggacctcttaataacgatttatataatcaatatcaccctgccaatcagttaaggaaaagtaccggagcttctttaatagagagaagattgttactagagtatagatatcactataaggctcatagtcagtagcagtgtagtacttagagagctttttctttactgtttggagtgcccacaatatccgtttcttctagatcacacctttattcttaagcttcacctcggctgcatcgagataggagaaaagcttattatagatactatagatattatatgcggtaatatcctttatctttgacagtatcattataaaatcaaagaagggctttgttagaagaagaagatactcgacttaacgccactcttctggatcaagcttaaaataaagatattgatgattagtataatactgatcatagaatagctggagcttcttagcccagttgagcattaaaaatattaaattctatcatatctgaatatcttagattagaattaatataggctccggctgaagggccataaatacctcctgacgttatgggcttatattaataaagactgctagtccttagatcttctatacttttattagtctagctattataaggatctaggggtagaagatataccttttttaatatatctatgatctggataccgctagaggtattacacttattctagaaggagtgggttttttcctcagaccactctaactcaatctctttattacttggcactgccttaagcttcctaagaagcttatttagactcagctggattatatgcgcgatatatgggacacagaagattaagatatctgatgaatactaagactaaaggtggtcctagatactctgtatcaaagtattattattagttgcgttatctatagtcactaataggatataatccgagataccatactctgttaggatctaggtcatagttttactaagattttcaccagtataggagccatagagaggctcaaagcctagaagaaccttatagtaatcccagttataatcaataaagtaaccagtgatagttataaaggcctactagaaaggagaagtccagtaatctaaggctattgatagccgatacccctctagaagtctctatagaatccccttctagttattctggattattatatcgagataacatcgaatggtttatactaatggaattgtaagtttagtagataattgttaagcaacctctaatatgcagtagaattaggggtattcgatcactcgaaagggcagatatacagtcgaaatgaatcttagaatagcatcggagagatagtcttaggtaaatgatatactagtagtacctggctagatcaaagtactcaatattagctactaaattataaagaacttaactactgtagtaatactagttaagtgctctagttaatataccattcttttgagaagctggtcgattcttaggccacttttttttaaacatgctccagttttgaggtgtgctgtcataggcgaagaaccagtataccggaatcttagatagccaattgtacagagacataccttatatataacctttagctttccatttttattatttataacctggtagaagctatcccagatatccgatttactttttgattcctatcgaattgtattcctaacatcagactgagatctatacttagttataagctaccaactaacgaatttattacgtaagtcctccatattatcacatatagaatcagatagatataaaacccagtgcttttgaagggaaggtccgacgcaagtaagggataagggtataagggttaaacgagttaaacaagtcggcgatatcgataggactggtgtttagatacccaaaaaatcggagaagttgttagggtaaatccaatcagaagctaaatccacatctgaattagtgaacgagaactatgattaagacattaagaagttaacaattataatatatagtatagtagggtacttaaaagaatagagaggcttacatctgaagtagtagaggttttcaggggtaaagtaagtatactaggatattctaacttagacttacttttaatgtggtttacctaaatgattggctgtattatatattagtgcagataattagaggatatcctacagattttaaggatatcttaaggatattgaggatatcttacagatattttatagatattttgtggatatccacaagatatctgtaagacctcgaaactcgcaaagtccgcatttcaagaacttctatctcggatttctcaagttctaatagtcagaacaaattgaaaaaataatcagtagatagctaggactctcagcttttatttaagcctaaggttgaaataattcatccaataataaaggttttgattttccatattctgtttcttacaaagtttatcattattaacagtcgttaaatatatatttctatatataacttacaacaaaatcgtcaatctacggccatctttacaacaaaacgtcggactaagaaaactacgacactacctacaaatactatataaggagaccttcgatacatatctatttcctaaaatttcaaagggccgaccgttgattaaaggggttggttctatcaggaccaaacatgcgtttatttcaacggtaaggaaatattggtaagctatattaagatcatatgacaggctacaagggggaaagtaagcgagagttatgctagtgcggatatccaaggatatccgcattgcggatatggatatcaactcatatccgcagtgcggatgtggatatcaactcatatccaatatccgcaaattgcggatataaggatcgatctgatatccattggagcggatatgccgcagtctaagtataagtataaggtagtgaccctaatcgccttcgaccttaaaggtacttttaacggagtcaataagatcagcctagatacgtcgctataggtaagacggatcccgcttatagccagaaaatggattataagctttataagcgaccggcacgctaatatcgggtttgacgacttccgtacggagactactccgctagtgaactctaggctagcttaaggattactactttccgctatcttatttatattctttaataccgacctcgtagatcagcccgtcgactcctagggaggtatatcggcattcatcgacgattacttccgatagagagtagggggctcagtagaagagaatttgactaagatacaatccgaggatatccctcgtatcgaagagtaggcgcggagaacaggatcctgcttcatagcggagaaacccgaacttatctatctcactagaaaaaggggagaatatatagaaggacgaatcatctttaataggaccgacgtcaagccatcgcctacagctaaattactaggctatcaagcgcgccaccaaaacggcaatcgctttaagtggactacgacacttgcgcccagagcagatgcgacagctctaccaggcatatatcgcccctatagtagactacgtatcgacgggtaaggaaatattggtaagctatattaagatcatatgacaggctacaagggggaaagtaagcgagagttatgctagtgcggatatccaaggatatccgcattgcggatatggatatcaactcatatccgcagtgcggatgtggatatcaactcatatccaatatccgcaaattgcggatataaggatcgatctgatatccattggagcggatatgccgcagtctaagatagacgaaaacatctttcccagctaggtttagttcctctgtaaagtaagcagaggctattacactataactggcgagtaaagaccaccgttcgctacatatggaaagaataggtggtagcaggcataacatggcaaacgggagaggggaagctagctggcgatctggcaagatcacgagatccaccaagcgattccaagtggttctatgtaatatacggtactgtgacgatgactcattgctgaccatacaaatattacaatgacagttttgccaaaattctgaggcggtgacctcacccggcctagcgcgcgtcgggattggtttctccgaatcaagaagaaagagtctggaggtatagctgatttcgaaaagtactgtatgaaattagtttctggtacgaacctcacaaattaggctgcaacaatctgagagggtatttattcaattacgtaaacatattattttccctctttctatgattttcttacctataaaaaagcatttaatgaaaatgctgagcaatccagtttagtccttttacgaatgaaagaaccctcaatctcgattcttcacgacaagctacgaaatgggccaagttgtccaaaaaagcccagacgaaggtcaattggaacattaacatagcctatgatttgctcaacaagctattatgacagtcgttttggaaaccaaataatattgctcaccggtctatgccatagtattctgtactggtgtgaggagtaattttatcgatgatagctttaggagcggtgatgagccattttcaaaattttacaattgaagcacatgaaaaacctcttgaaggtatcgaaagatcagtcaagtagaattatttttagtcacaaatgaaatgtgccattatgaactaagaaatactacttggcagaactttgacatgggggtcctagttgtagatttaaacactatcgctatgtaatgaagtatgatgatgattgtttgaagctcatgaactgcgcattttgactggccaagttcggtcattgagatactgcgatctgtggaactagtcgatctacttgccgtttctccgcacttatatgagatagcagaggaagcgatagaaaatgcatccgttcagattaaacgatttcaccagccgaacttcttctgttcacggttacagaacaaaattccacgagttagataaacactccttggtgatgatctcagaaaataatgacttttgatccaaagaagcattcgcatgacctactactactccaccacctcagtacaactgcctcggagacaaccctcatccgtcagcccaatctggaaaaatgtaatgaattgctgaagctatctgttcctggtgcttccatatgtattgaagaagtgatgaaagatgccagagaaatcttctaccgaatcgcagtcagccatccaagattcctctcctctattccgtcgccagtatcgccactttccaagcttgaatatggtttgaccacggcccacaatcccttcggtgaagctgggaggcaggcgccagggtgtgtaccattgagagcggcttgacttagcggattgcagggatattcggcctaccgtcatcagcggttgggcattttgtctccggtgcttctatggccaaactcactgcgatgaaagttgcgcgagatcaaattctcaatgttgaagagcgttcgaatggggccgtctatatctcggaacaggctcatttgtgcattcaaaaggccctttgaatcattagcatttcgggccaagaaggcgaaatcaaagttggttgcaagttccgaatggatctctcactactgaagacaaccatcgatgacgacctttaaaatcatcgaaaaccatttctacttatggcaagctgtgatactaccgatactggaagtatgatggcttcaaacgagctcgcatgtacagtgcaatatcggaagatgtggctgcatatagatgttgtgatataaggttggtgcagatcagaaacaaaaaacctctgaactacaacaatagatgcagcccacagtggctcggtcgctttctctgtgactcatcgaccaaagaacaaggaaatctgcttcgcagatagtatcgcctgggatgctcataaatggctatctcaaagccatggctgcggcgccgtcttctttcgtcaccaatctcaatagttggaaagtttggacgtggaacgccaagaagggcttcccaacccctgagactggggcgtggaaaagacccgtccggcacaccatataagactgtggtttacattacacgtgcttggtcttcaaaagatcgatcaagcgattagccatggatttgagctttcagcgcatctagagtgtatgagcagtaccttggttgactgggagatcatctcgccgaggtggcagcctcactatgaagaatataacagcctggcgaagcacatctttataaccatgttgctgagctttcccaaccgcttcaaataagcgatagagtaacgctcgtaggtggcttacgagactgtggaatgcgcctgagagcgtttacagtacagagaaggtgcatagttcagaatctgcgatataagaaattcttcatttatgtaatctttatggagaacattttggccggccggtacaaagggttgattagattaggcatgctaaagaacagcttttagaagatagttgtattttaaatagtactattgtcaaccgagaagcagggattatcatcgataatagtcgaaagataatgggcaggggctgtgcaagcattaaacaatgcgtcgtctattactatttgtgcacttcgaccaaatctgttcgggcactttgggctcttcaattggcccacattgcaagactccattttaaatacgtgcccctgagctgaaaaccccgatccaaaatgattggccaactcaggttaaaaacatgacgcccgagcgtccgcttttgacatgtcatattttcagttggaccagatgcgtaagcatacggacggggttcagactggcagtgcaagtcaggctggtgctactgccaaaccaatacgatcaatttgaattggatcttcgttgatgagacgtattcatgaccacccaagaagaccaaagacttcagaacagcccaggcttcatagggcgttttgactttccgctatcaatttacccaggtgcccaccaggatcttctttatttcgtcgtttccattcaccataattctggtttgtatttgaaaataaccctgtcaagtcacattactgtggacaatccattttctagcgtttccaaaaggcccatgaattgcgagtcggggtacaacgcagcatcaggtccggacatcactggcgcaagacgagagcaaattcgcaatgaccaactgtatactcaccgagagtgtgattgatgagatgaaagaaaaaatgagaaatatctacgcagagctgggcaaagtggagaagagttgcaccgaaaagattgaagatgtctcacagatgaacgaaaacacgatgttatcgcatgatcagtggaataccatcacctcgttacaccaagagctcattgagaaacattacgacttttttgtggtttcacaagatctagcagccatcgcgaccataggaaacctggctgaaaagcacaacatgcccgcccgtatgtggagttacgggatctatcgttacctggaactgctacgaaaacatcgtgctcactcgctcgacgtgcaagaacatttgctaaatttcacacgtctatcatatctgatggtgacacttcttttggagaggatatcgcctttcagggagatctggaccgaatgcctgggcgatctagcgcggtatcgtatggcggtggaggacacagatggagcggatcaaagaacatgggcagaggtatcgagattttggtataaccacgctacagatcagtgtcctgaagctggtaggattcaaaatcacctcgctgtgatctcgcgcccggatacattgcagcaatttttctattacaccaaagcactgataatcgcgcgcccattctcagacgcgtgggcaagcatgaaacagctggtccattctattcctggggcaccgggtgataggaacatcttggtcaattcttttatggctgctcatggtgcccgtatcttggacttgccagttgagcagttcgctcttcggtcgaggatcttccttacgaatctgcgccaagacgtcggccgtttaggtcaagaagcacaacaaggcatctttgttacatgctgtaacatcggtgcaatacttcaatatggcaacaaagatggtttcattgccacggagttcaattcaaccgacaatactacgcttggagatgcctatgctctcgcaaaacagtgggcgtctaaagcacacgtcgacccaaacagccatgtcagtaccgatttatcatctcaatacgcattcagtgcaagctcattcgcttttcatactttggccatcatcctcaaccagcctgatgactggaacttgcagcctgctgtgcatgtctctatggccttcctgtggtgccttacgctccacccagcagtcatccagcgacttgagcggctggtcccatggtcgatacttgccaactacctgaacagtctgtttcagcccaacgtcaatatttcaacgatcaaaggcaaatcattcccccgcattgatggcaccaccccacagcagctgccggaggaccttttaattagaggccacacttggagccgactttactaccctgccatgtttttcgacgcgacagccatggcagaggacaggccattgattgaggatccttccacaatgctccttagagtacacaggtgcctgtggcttggaatgcagatcgcatcggtctgcctcacccgaattcactataatgtactctggtctaacctagttctgatttagtattctcgttggatgaagtacgacgatattttacggttcacgcctaccagacttgcatacgaatttgcgccaatctctcaatccctagaccacctcagtgggagtctctactcgacacctaggctcatggattaggaaatgagggaagctttgaaaaacccacaaggtgaccatcatctctcttggtcggaagatagggaccacaatatcaactatgtatagtgagtaaaatcgaaacagtagtcgaagatttctcttttgcggatcagaaagcgcatcgcaacctgtgttttcataaatgtaaacgcaagttgacacagacaaattgtataaatgcggcagactcggctttgagtcccacgtctggctggtagctctgagttatttcatagttgagccgtcgagaaagatcgctcctgggcgcgggttgagagatgaggacatttgcaggccaatgttactatgtagctttttcattagcctcactaggcgcaaatgcagcatcggaagaacgaaagtctggaagcgctgagagaaaaatctcttgacagaaaccaatgatcaaaattctacagttactagtggtagtatcaagccaactacctgactaccttgacgctacgaggtcgaaacttcaacacaaaacctttctagccttgcatcaacgtttttttcttggtcaactgctaagatcttgaaacacgagacactgattctctaagatgaacgaccaaccagaagtgaagtcccaatcgcccccaacactatacttcgcacaactgtgccaagactcctgtctcatccccgaggtttcaatagtgatgctagagggttcatcaattttgcacattgcgacgttagcgcttttgcttactgcgccagtccttcagttctctgtcgtcataaagagagataggcatatgagcagctagaccctagagtctagaagaatagtaagcgttgcaccttcttctataagaacaatcaaactaccaagaagcatgcacttcgagtacacccccggacctcggtttgacggtggtggagaaacggcaggcttctcaacacctgttgtatcgtacgcacctgaggcatgtcacaaagcaacaacgtatacagttttgaagatacattctccgatcaagggacacaaagtcctacctgtggagcgacgagtgatatcttattgggcaatcacttacttgttaattagcaactcatccgcatattacctgtagtcgagtagggtgcacttactcttcttggccagccactactatcttgtggatacacattgtggagatcatatggcccgcaagacagccacatggacatatttatgacctctctgaagcgagtatcagaatgacaaaatcaggggctccaatattcaggtctagaatgtatgcacgggctacttgggctacttgggctacctgggctacttggccatcgatcgtataccgtattctaatattcattcattatggatggggatcgggcgtgtagagtgatatatagccccgtcgaataatgtgtggctacatcaaggcgggacccagacggtagtgatcaacgctgagatgctatagttgatcaccactgttacttcgaccgccgctgccgaggggtccaagctagccggagcttagaggcctacttaaggcatgaacacttgtgagcaagctcattctccaaaattttctttcattttcattcatacattcatatggcttcattctgcatatactggtagatgatacatccaattctcatcgactctggttttcacacaatttgcaattgtttccatctgaaaaatgacaaacttcactgaccgcgcatctgatgaacgcggtactcggaccttaatactcctgtggatcacagcaggtatcgcacttgttgttatagctttacggatttccagaggggtcaaagaaagatatatctacgtggaggatgttaccatcctagcatctgcagtgagtgctccgctcatgtaatttgcagcataagatatctgacctcaaatacaagattgcggcaatagtttactgtgctaaaatcacaaatatcattaacgcaggatatggacggcacaaaattctactgggccaggaagaatacggaaatgcaaattccgaaatgatgtactctcttgtctggggaaacatctcgacagccgtctgcaaaatctcggcggcaatattactacaccgggcggtagagatcacaactttcagagtatgttcaatactgctgacggcattcggatcggtggtatcacttgcttggatcgtgctgttagaaacgacctgcatcccttctcgactgttaccaaagataggagtggctggtggaggtgggtactatctaatattttctatcagcaggatttgttcaactgatggattgcagtgctatcaattctactctatgttcaccttgcaggtaatgcgaccattgtcgtatggacgcgggatgctcctctccaaaaaaggctgattggttgtgctttttgtgggtcgattgccctgtaagttgaatcaagttgttatgtttttaggatgaagaatagaattaacgtgaattgtgatagagctgtaccagtggttattatcaaatgcacgaatctcaaggctctcgctgttgggcatgacatgacatgtgagctttccctttggggagagggggtcttgaaaccgacctatgtccaatccattttctgaggggaaagagctgatgattgattagatacgatggccccattgctaatatggataaagtgagatcattcgtctgatctagtgaagcacagctaacacttgccggttagcttggaattctgcgtcttttctatcgtttcaagcctggggcctcttcgtatgacctttttcaaggcgaatgagcccgaaggcaacactacaaaaagtatcaatacagtgagtaagtgcttctttcctcagctggtcaaagactcacagacttttgtggtaccactatagtaaggctttgagttgatcccaggcgctcggcaatactatcaaatcacaactcggggggaaggcatggactggagcctattcacatttttcatgacttgttggctactctatttggtttgatgtaaaacgaggttggttcatctcccagtgagggaacagcataccgcatccctccacgtatcagcgcatcttttataagataacgatttttgaagccatcgttgatcaaatctagcacattgtctcagcggttaaacgagcacataattctgtatgcggcatccacaaagtgatctattatcttggcaacagatcgcggaactgtctggatattgagcgatgtgttgctctctatcaaaggccgtgaagcggagagtcatggagtggaaggcatataatgagacgccttctgaatgaagaacatgtattttccaagttttctatctcattcaggaacgattctttctatataaaacactaatatatagctttctatagcaccattatattcaatcctataggattgtgcacgccctcaaagcccatacgcattcgctccaatctatgcccaattcacctaatgcccggctgctgtctttcggatatgccaatttgcaggttgcaaaatattttggatcctttacgaatgatgaccgagctcagattcacatcctgtctaatacaaataaccgccaacccagaaatgttcaaaattcaataagagtggttggtagagctccgcatcaaccgcggttatgaccgctgcggtgcgtttaggtaaccgcgaaaacgcggttgaggtttgggattttcctatatgcggtcgctcaggccacatccagaaaccgcacatggtcaacagcgggtagaccgcggttgggcaaacgggccaaacagccaagaccccatgaattatacatattttatgcagaccacgacacttggatagtataaaagctgataaacatgtaatcctagatctggattctttatgaactcaagataactgagcttttcagcaattttgtgcgcctgacgatagcttaattaggctagttatgtatttgcggtctctctgcggttgaccgcagtctgaccatgcgtttttttagtgcggtacggtgggaattttgcttaaccatagttagcgcggttggggggtgcggttgggctttgccttcccatgcactggttgtgacgaggtccatggtggtgtgacagttcagggactgggagcagaagaggtcgacattggaagaaaaaactgggtaaattggcctgaggccttttaagtcgtagaggaagatggggatctcagccttctcccaaacttctttcctttccttctcatcttgctttcttcgtatcgaacgacccagaattcaactgaatttattggaaattgcctcatcacaagtgggcaaaatttccaaatgggtaataccctttcctatcgcacgatcacaggtaatctttaattgtcaaacacattacgcttttctccgagggcagcgctatttcgtttttgagtataaacataactcaaaatggacttattaggaagatgggccaggtcgggttttcttcattggattttgggtaataccatctgattcgaaaaggcggctacaggaggaaccgcttggtcaaagtcatgtaatcaagcagcagattgatgtatcgaatgtctccgcgatggcctgccatccataggcttgaacgcggttttccgccgacccagtgcactggaaaattcgttctctgcgcaagcaatgattctatcacgtcagaattttcgaagtttgacggcgtcggccagaacagcggtaagtttcttttggtctccgacgtgcatataatagtgacttcagaatttctaaaagaggctctgattctccctccagggggattttttttccaccagacgggggaaaggtttcaatgtttccaagcaagtctcgcttcgcttttttaacctcctgaaaccatatagttgtcgctgaatattggattcgacaaaattaagacttcattctccagtggcctttcaactgactgagtccggtgggtgtactcatccacgatcgcctgggttaccaacatatagggtaggacatcacggattatcaattaactataccacaaactcaacccgtgaatatcttcctaatgatacattgtgatcaaaatatgtctggtttcctcataagctgcgacgacctttttattcccaaggggccgattgaatttatggtcaaaagttgcatatagaagcaagctaacggcacgaaaaggtttcaataatcaatgcgagtggcaatagccacggccagaggggtcacattcgtttgagttgacgatttgcccaatgaccctcaattatcatcaatttgatgtcggccaaccactttgccaacgttgtcatgctcggcagaacttgttgctttttgtatccagctccgaggctatgtggttgaaaagcaaggccaacaaaacaagaactagcagtcatccacctcgttccatagcagggcgttagtggagttcagccagcatgatcaagaacaataagtctagtaaatgctggtctttcatcaaacagccaagcttgaaattggtttctagctatggactttcgaaccctagaagtaagaagcggaatgagctaggacggaaagagctggtggccgctggaattcagaaaatacttcgctagaactcctgcgcgaaaatccggggtaacaatttaactgtgccgattgatcagccctatgtctccaccgggctggcgggtagttctgtgtaagacccacgactgctgctacaaccgctaaaatatatcccggcatctgctcgaggaacaccgccgacaaccccacagcaggttgatgttgaagcgcgtaacttcttctaaacaggtagccaggtgcacatatgaagtcttccaacgcccagatgccgtagttctcgaggaggtcgaggaagaattgggcgtccgttttgaccgaatcaactccgacggtgttgaggtaactatagaattcctcgtagaatcgctggatatcatcgggatctatggcaagaatcttgccctcgggaatattttgtgcaattgggccattggagctgggatctttgacttgtacttccttggtcttgtactttcgagcgaggtcgccatcaggactgattccaccccaatacccgaacaaggcatgccaaactgccacatgctgaatattagggtttttctggcggatttcgtcaacggttcgtttaagacctcctgggaaggctttttcgtttgcctcgaaccgctgccaccgtcttctgaattgggactcgccttcgttgtcgagactctgccagttgtcgtcgataatcagattcgagatgctgatgccgtgagacttcaaagattccaaggattggagaagtttttcctccgttagatcctgccccaggctattccaagtacaaaatgtcaagtcatcaaaccactcagccagccattgtattttcgggtctttctcaacaaagacaatatcatcatcgagaggagatatcggagacgtctcttcccaatcatccattgaagagtctgagaatggcttgaccaccttccgcgactcatagattaaagcagacatagcgacttcaaagtcttccgcaacagcagccaagacattgaattgggcggatttcgtgttatcgttcctggccttgatcacgacctcgccattatcgccagactgaaaaaccgtcaagacatcgttgatacctgaaatggctagcaaaacgagattcagaccatctttgcgcaggaaagagcatagtatcgcatcttccgtcaaatcaaaccagtctctaccatgtcgtggccccagccacggactccaaacccgcaccaaggaaaagttcctcattattgaaggggtaccgagaagaagagtactgattccggatgctccatttgctgctgcagacacatttcctgatattgaccatagtagagaaccgggggcctcgctggtccgtgactcgacttggatatcttgcgaaaggttggtgatatattttgcgagctcttctttccgaacctgagaggggaaataaggtgatagcgctttcttgattccggattcgcgggcagtgtatacgatttccccatcaccgaccgaatgatgagggtttacccattgccaatcggtttcggggcttgtgcgaaagcgcaccgtgaattgtgcatgcccaccgactgaagggagttgaatctgtcctgcgaatatgtggcgataatacctatattctgtggcgtttccactaagcaaaggcgcggctgactgtttggtttcgtgcagtggcagcgccgtccagtctggatcggagatgttatgccagatttgagcttcccagggttgatctggtagagatgtgcttgattcgatggtgacggtgaagcgcacctagtccagcctttaatactcgatctttgtttattgtattattgtacccaagacagctgattagtactcaccgtatcgccatggtccttctccgaccgcaacttcttttggactctgggaatgctggttacttgacccagtggagggtagcacgtcacacgggcgaaaagaaccatctggaccgggcgagcaaagtgcgggctctgatgtttcgtagaatcgccaggtccgattatggggagattggaggtatttctgtcaatttgctcatgcatgatcggatgggaggggtaagctcccagctctctcgggtgcagggattagattaagctgtagctagccgattagcgagcgtcgagttgagaaatcgaccaggccggacccgatagctgtgaactttggacgaatgacaaaagatgaagagggagagggcccggggatcttgtgatgtgctgagggaagcagcggggaaccttcctcaacgtctttgactcttcggcttctgtgcgctacactgcatcctatctactatctaccttacgatgttcgatcttctttgttccatgcacggagatggagtatctgtagcattgcttttgtagctgagtattccttttgcacttcctacttgatttctagtgaatcctaacagctaccttaccaaagtgcttttaagcccactatttcccagttagtacagatatccttttacacccaggagggaacagttcacttcacttaccatatattcatacgtatcccgggtttcagctagaaaaaagaccttatagtctacaatagggtaaatatcattagcttcaatcgcgcgaatcatatcccgcattagcgccttactcctaatataaatactgcaaaccatacagatattacttagagtatctagaacactaggctaattagtaggactaacaccacctaagaatccaatcacactgatcactccctcaaatttaatggccttaaagctttactttagggtaccacttccaccgacttcgatgatatagtctataccggcaccatccggggtcaacgcgcgagcagtctcaccccagttcagattggtcctatagttaattatataatccacacctagttacttaagtttcttagctttcttatcggataaggtcgtagcaatcacaatcacacccgcagctttggtaaactaaccctcacggatattgattagccaagctgctctttgataactggccgttagctaccatgggcgaagcaatcacttacctaaagagtaaagatactcataccgccagttccctagactagaacaacctagctaggctttaacggccttaggtcgtacagcacattccagcttatcagagccgcgtatatcagagtactattcttaactagtaagaggttcttcacagccttaacaagacccttctcagcaaaagtgccgtattcgcaaatagtactatcgattataccgcctagtccagtctatatcgcgggaatatcgatcaggccatattagtaaccctagttaaagagcatcgcaactttattgcccttcttaaactcggtaaccttagagccaacctcaatgacctcgctagcgccgtcggagcccgggaccacagggaaaccagaagggaagggatatttaccctgtgttgtggtgtggtgcaattagttaactgtcaaactgggttgctctatcgtgctggtattcttaccaaaggaataattaagtctcggtagttaagcaaggcagcctaaagcttaaccagcacctctaattcaccgatagttaggaggggcatatccttaaaggcaaggccgtcaaagccattatccttattctcaactacctattacttcatggttaaggggactattgttttgtacgacaattcaattgtaatttggttggattttggagagagagaggatgtgtagagaaattggcagttgcgatgagttgaggtgggactcggaggggcatatgaggtcttctataaatgcccgcgaattgacgtgggcgatctaccgattattacgtcgaagatagggagtacaggtggtctaggctgttctcgggcagatgagagaccgttctcggacacatttcaatgctgatcaatcccggttcatcctgaccataaccatccatggcttatcctaggctcatgacgtcaggagtatggcgttatgacaatgatacattgttagaaaaaggagagaaggtgatctagaagagcctctatgttatttagtactaaatgatatggcaattttaatatgtaaaatctattccaatcaaattacacgcccgtcatgtccactcttccccagttggatgtttttatctactctgtgttgaaaatagatattaacctgtcaccgctggaaccattcgccttttcttctcggcgttcgggttttgaaaactttaaattagttctttattctccaaatatagcgcaattggactaacctgtgcggaacatcaaaacgtaagttactccggagcttttgcttttcgttgttacttcggcggagcggagcttcgggatctgaaaacatggacccactgggaattctcttggtcctgcggttattgcaagttgcagaatgagaaaatgacggcagtcagcatggaatttgtatcaataaattaataaactataaagctatcggagagatatttcaagtttacaagatagctctgatcaagtacagttccgtagacattctatgctagcctcgcacttaaactatcccatggattaacgatgatccgcttatcgcgacaatctcggagctggcctgatcgccggccatttttggtctccgcgactcattcctccaattttccactggaacgccctccctccttacccatttcacatcaatcggtcccatgcgacctcggtcaacgcctcttgttcgcgcgacttgtcgcaacgcgcccctacctcgaaccgcgtcatgcggagcacgtagcttcgccgcagcatcgcaaacaaatccgctccgttgcgagacccgtcgcccggctctgttttttcaacaatcccagtgtacaccgcagcagaagaggctaatcacgcaataatagctgaagtgtattcaggatagtaaagataagtaggctcagtatacagaggagattaacaagggtaagaggaagagcttcgcggtttatctaaaagaatgtgggttaatttatgatattattaggtatgttgtgagctggaatttattcggggtcctcttctgcatgagttaattgggaaacaagtactaattgtccatttctgatctttccagagaacgcgatttgcttcatcaggtgttcaccgagaagagggtcggtatctacgtcggaattgaccctacggcgccatctatgcacgtgggacatatgttgccgtttatggtcctggcttggggatatgtttggggcttgcctgtcacctttttggtgagtttctttgggcctgagagtctcttgaaatggctgactgacacaaaatagttgggtggcgctacatctcgagttggtgaccccacaggttgactaaagggccgcgaaaaagtttatacctcaattcgtaaggcaaatatagctagtatatatatataattaaagaagctaggcactagtattaagcagtacagcaagagatacagttattagaaacaggctatctagagataagtgttagttaataataatacttagtagaattcaatgcctttcattaaggtcctatgcaatctaggcgccttcactaggctaggacctatacttagctgagatacgtgagtcttatcaatgcaatttggctgttcagttgaactaacaattatattcagtgtcaagaatcggatgaaccagggcgatggcatgtcttttgctgagttctcctaccctcttctccaaggctgggactggtggaacctgttccagaagggtactcaagtgcaagtgggtggatctgatcagtatggaaacatcctgttcggtatggatgccgtcaagtcaattagccgtaacactgccgatgagcaaaaacgtaatcctttggactcggaactggaccgacccattggctttacaacgcctctcttgacagcctcgtctggagagaagttcggaaagtccgctggtaatgcaatttggctcgacaagagcatgactaccactttcgagctttaccaggttagtttactcgttccatgaagcttctgtttcgtctagagctaattattttccagttcttcgtccgcacccctgatgatactgtggagcgctaccttaagttgttcactttcatccccctacctgagattcatagagctcccaagcttgagcgtaggagcgggatgcggactggggggctgtgcggttatccttcttcccaaattctaatcgcgtttataggacatgaatatcggttgcccgacccccgcagtaattgcgcgtagtgtgtcaagaccgtgtgatttgaattgtgaatctctttacgcgaagcctcacccaatcactgggaaggtcagattgtggagtcttcttggcatcccacacgccgtccttcaaatgccatttgaattattatttcacgcacaggtatgcgatttagacatcagtttgctcgggtgctgggaacgtagtatcacggttgttacgactgaatcatttcgtacgatcatcaggtaaatggttctattctggccgttctatgaattctcaagagttggttgatctatgattcaactgctgtaaattcggtggcttggatcttccaatcatcacgaactcggtaattttctccggatagcccaataaagcgcaagtcatgttatggatataacactggttatttccattgccctgaaatattcaatttcgatataggaaatgattgacagagctaagttgttgggtgcgtcttcgaatgtctgctgttgcccggcggccggggcgtcgaaactgttaagagtggatacttcgtattgtaagtgaaagtggcatcgaagttttcctagtgccgatggttcatacaacacctaactagttgattacatctcgctgaatcttaactagttataggaactgctgaatctgcaggacgctcttactcactctagactattttccatgtatttaaaaacacatttcaaatgctgtgcaaatggcctcatgccttgttaaagtactagtacatactgcaacggattcgacacgcattcatggataatagggttttgcatgaatcgtgggcacgtgaagacattacggaaaacacggccccaaatgtgtcatgcttttcaaatcccgaacatgcgccattttctggatagaccaacccccttggcagaatcacaggggtcggacaagagacgggaagtgaccgttttagcgtccgacaacctagggtgaatctagggggtagaatccagagaaatcatttgacatgcgttacacacagtgacacaacaaaagcctgtaacatatctgtcgattcgtaggatatccgtagaagctagtaccgagggaaccaattgtcatgattgagagcgtctcatagcctcaggggctagtattggcatgttacaatatggatattccgaattaacccggtttaccatacaaaaacatattgaatgatggatcgctgaatcagcctgtccttattggtaactaagttatctcagtacctcagccgctccacgtgacaatggtggcggtataccgccttctgtttcgagcgattgttgaatcagcttttttgtggaacgtctgagctcaaactagtatggccccttataatttatcggcaaaatagcggtcaacactaccaaattcatcgggaaccatattctttaatctaccagaacaatcgccacaacggtgatatcgaaaatcgagcgatcacgtcttctagatattgacgagctgaatacgttgatctaatttttttgacgcgaaacggtcgattggggttggtgtgacacggtaaagtattgcttgaaacccccatacaaactttgaacctcgctggtggtacgaaacatgagaataaacactaacaatttaatatatatatatatatcaggcaattctatacggtttcaaaggtcaatacagatcgattacgttgttttgtggttgggatacgcattgtagtcatgcgtccacagaggaaaccgcctcggtactggcagcgcctccggaacaaccgcacccgcgagcaattgtcatctgatattaggcctggggatcataattctgcagcagttcaaggcgatcgggaagcagttctaatgacactggcctgtttggactttggacactgagttcgaaaaagctgacgtggtataacctctcgcattccttccgagcagataaagcaggcacaggatattatcatccgggctgtcagggaaaatcgaccctctcagatgaaggcaatagaggaagcaattgcaactctgtacccctacaacgcgaagcccggtcagcgggaggcacttcatcatcttatataccaccgcaaggatctcatacttattgcgggtactggatttgggaaaagcatcattctgcaagctgtttcggtcctcctccagaagtcaacaacgattgtcatactccctctggaccaaatcggcaacgagcagtcggattacattcgacaaattggtggcatactgtactttttaaataaagatacaatttaccctaaacttcttaataaagtataatatagatactttacctatattttagttagcctagaacttacaattagtaactaatttcaacctatagctagtagtctatctttcaaataataagtgagcttggtggttgttgatgaggcccatctcgtgcatcattggggtcgaaactttcgggctgcatattctcgtctgaatctgctgcggagttggttgggcagtcaaataccctagtttacctactctgctatattagatcccgaaatactagaatcactcaaaagcagtattagtttcaatctagatattaaggtttagcggatatctattaattgacccaagcttctatttcgaattggctggattccgaagaaagcaggatacaaaccattacggtttctgttcgctgctgatgagaaaaccacggaatcagtataccagagactcagtgagattccaaagacaatcatcttcttcgacagcagaaaggatatacatactatagcagaggagtattaggcctggctacaagacatcaagcctgagtggacatatgacaatgtgacgcagtcactgaaaacgttccatcgcaacacagcatctgcgaacaaagacgctattctgactgaatttgggaaggaaggggcccgatctcaggtccgagttatctttgccacagaggctctcgggatgggcgtagaccttcgagacattcgtcggaccgttcaatggggcgtccctataggagaacatgctgctactcagctgcaacgaggcggtcgagcgagccgagataagctggatggtgagatgatcatgctacttcctgaatgggtttccggcgagcgttcctctgggccgaaacaaaggaggagtcagaagcaaggccaagggcctcctgttattgatgcaatcgacactggattaaaacctgaagaagaggcccggaaagcaaagaaattgactgataaacaacgtcgtgatcacatatccgacttctggtataacctagcgaattccgaacgcaaggaccctccaatgtgcatccgtcgccaatttctggatttctttgatgagcgaaacgaatatcagtcagggagacgccccaaccgctgttgcagtaactgcaacccccacaatcgactcggaaagctggatggcttctatcaatatcacgaactcggccctcaggcaaatcaacgaacaagacgagtatctgaagctctttctaaatgggctgaagagcaggcctgtttgttatataaggactgtgcattcttaccagaatccgcgcttttcctatcgccagacttgcgagataagcttgcaaagaatgcacattcggttctcgacatagagagtttacggatgctcatgggtccatggtattggagaaaatcgcacgaacaggcccttttcgatatcatctggacttcatatcgtcaagcaaacgccaagactccaagtactcaggccagtcggtcacagactcccgggttgagcagccagtctacacttattgcctgctcatttgacttatcaacgccgtctacatcatcacaggactccggcccgaggaactatcaagttgttggtttgtctccgctttctacaccattgccatgggattcgccaatgcaatcgcaggattcctgccccaatttattgagcaaggaaaccgtcaatgcatcaccactatctcgacctgtgaccttaaagcgatcagctcttgaaccaatatccggcaatatacgagggaagaaaatgtatactcggaacacctgactccacctgagccggcagtgagagtctgattcgaggttcggcagtaggaagtgggtgatatctatggattagaaacagctctttttagtacacatccagagtgatgggataaacatcacccatcaactatatcagatcatcaacgttgccatattcgacttatcctcttcaggttcctttgtaacgtaatcatccaagaccccgatggaggtcgaggctaggcctgaactatcgtcaagttcatcacctgtccattgcccatgaaccaccagcttgttgaatcgtatgaccccattgacaatcagcgcacaacctcgggatacaatatctggtggttgaaatggagaatctctgccatccttgcgctcatcaatagaacctgaactgtatatctgaaaggctaggtttcgcacatcatcgctcacatcctttgctgtatgtgtgctgttggtatgttcaccaaaggcctgttcaatggactccttcaggtccgtacagtaactagctgttaaagcagtggtccgaaataacgtagcaacatcaatgctcgatgtgcgccgagtggccataagagtcttcatttgtagattgaagaattcattcagacggtccatctcgaaccaactatcctcggctccgcggaggttgacaagcccatttgccaaaatagcatgttgcaattcttgatcggcagcaggagtctgtgttatccatgtcatataaagagacaagaaggcatatttggacttattactgccatggaaaagaagacaacaccgagcaaaagcccggcgtattatgcctatgtcagcccgcttaatggcaagcttaagagtcttgtagatttccatttgttgaaggaactttgcgtgggctgagtattcaacgtcaactggggcaccttgaggctggggtttgtttcgatttgcagaacttgactgctccgtggatgctctgggtggtttcgggacagatttgtattgcttgtcaaaagcaaacatagattctcgtatcttctcaattgtgttaaggaactcggcccggcccgattgacgaatatagaggtcaacttcttgatgatattgtcgtttgacacctggaggaaggaactggtagtatagagcagtcactcgggcgttaaaagcatggattgcaacctctaccttgtgatgaaatggacttttatggccctggacgcagccatgaagttcttattgtggtgtaacgtacaaccgatagaagcactctcaagaccggaatagagatcatgaatcatatccatgtaattggtacgccaatgaaaaaggccggggatgggtaaaatccagtcatgcttgtcatatgagagtgtagacccccggcgttctttctggacggcccggatcaacgaaatggttttttgatccccaaacaccagatgcaagatgtcattgaaatcactagacggatcgtacccaagttgatctgtaaagaccttgtcgatcacattgtaagtgccatctatagtgccttcattctcaagaattggtccgagactgtagtgcatcgtcttctgaggtaacaggcgttcaacacatgggaattgcggccactcaacaagctcatcggtaaagacatcatggatagcatcacgatgtgtatagcgaatagcttcagcaatccaatatcgttgtgtctgatgaagtatctcatcatcccggttaccgggcattaaacagacgtcgtttgggtccaatgagagatgtggatgaaacatagacttgcgtagaccaccacctggcatattatgactgatacgcagcttgcctgttgttgcacatatgtgttgcgctgggttccgaagactctgatgccgaacagtctcactgtaattgtcaccttttagcggcagaccttcggtgcctgaaacctaaggttgaaccacacccccccggggnnnnnnnnnnnnnnnnnnnnnnnnnnnnnnnnnnnnnnnnnnnnnnnnnnnnnnnnnnnnnnnnnnnnnnnnnnnnnnnnnnnnnnnnnnnnnnnnnnnnnnnnnnnnnnnnnnnnnnnnnnnnnnnnnnnnnnnnnnnnnnnnnnnnnnnnnnnnnnnnnnnnnnnnnnnnnnnnnnnnnnnnnnnnnnnnnnnnnnnnnnnnnnnnnnnnnnnnnnnnnnnnnnnnnnnnnnnnnnnnnnnnnnnnnnnnnnnnnnnnnnnnnnnnnnnnnnnnnnnnnnnnnnnnnnnnnnnnnnnnnnnnnnnnnnnnnnnnnnnnnnnnnnnnnnnnnnnnnnnnnnnnnnnnnnnnnnnnnnnnnnnnnnnnnnnnnnnnnnnnnnnnnnnnnnnnnnnnnnnnnnnnnnnnnnnnnnnnnnnnnnnnnnnnnnnnnnnnnnnnnnnnnnnntccggcggtcaacggagtttgcttgtcaacgaagcttttttttattttttaggtattttaacccacaacgccaaatatataaacaattaactataatcctcttctaggttaggcaataacggagggtgttcgacctcgaaattgtctaatcttgcgcgagaagcatcgctcatggccgcataaggtagtggattgcgtaactccgtaagcgcttccttgatctcttctgccttttttcggtcacgaatgtggcgatttgcatctttagtggatagggcaccaaatttgcctatttgcttttgcgacttgcgtgcaattttgcgttgtttaggcaatctattctctagggtatcctgtagtaggcctttatcctccgcaagctgaatctgggattgggcaacacgaagcaattggtcacgtatatcagccggaagaggtgatttatcaagtatattgaccattttattgcgtgttcgacgtgcatcccatacagatttaggtggtgtataagggatactagatatttgctctggtggtggtgtaccatcaaatatcttgagatccggctcaggggtttgtgcagccaccaaaggctcaataactagcttaggattgtaaggatagataccacgtgtagcaaatgccttccgaatagtacgtggtgtcattgctgttgcacgaattgcggttatttcagtaaaaaagaccgatatatcgcgggcatcaccaccccattgagcaatctcgttatttttagttcgatacgcttgtttcagcgctcgaaaaggagacccatcaagtggttgaataaggtgggttgtatgaggcgggcagacgtatggaataatattgtagaagtcacaaatatccaaaaattcgtaggtgagatgactgccatgtccatccatgatcaataggcggggctcttttgtactttttcctaggcgatggctcgtattttcggcaaagaagtgcagccaatcgattgccagtagatcattcgaatatccagaatccgaaacagcgattcgtgtctcctcagagagctttccaccatcataccatctgactagatgggccttccccggagcaacaaaatatggctccataacccaaccatcggctgcaacgcattcaattccggtaaccaattggcctctttcaaatgaatgggttctggtacggtgcttattggctgaaataacgttttgaggcctgccctggccaagcagaaagccagtttcgtcaaaattgtatatatttttggtcggaatgcgcttgataaatggctctaaacggtcataccatgccgttaaaacaccaatatcctcagcaaggatacgcttttgatccgcaggcttctgttgcacccaaaaaaggtcttccggtaggtgttgagccacaaaatcgtacacccaatcttttgcaagtggacgtgcgtctgaattggccctgcgtagtaatgcatttgccgatatagccaccattttagccgtaggtggtacatgtaggttatcaaggcacctaatccagcgtaccaatgaggctatttgatcctcatttaggcgggtgtaggtcatttgacgagtactacgagactttcgaccggcaaagcgtgcccgcaatcggccaacgggaacctcatattcacgcgccaatgcagcgaagttaggctttttggaggttctagcaactgagcaagcagtcaaaatacgccgttcaacatctgaatagggtttatccatggtggtggtagttgtaggtagtaaaataggagcaaaagctttgttgacaagcgaactccgttgaccgccggttgacccgcgcccccnnnnnnnnnnnnnnnnnnnnnnnnnnnnnnnnnnnnnnnnnnnnnnnnnnnnnnnnnnnnnnnnnnnnnnnnnnnnnnnnnnnnnnnnnnnnnnnnnnnnnnnnnnnnnnnnnnnnnnnnnnnnnnnnnnnnnnnnnnnnnnnnnnnnnnnnnnnnnnnnnnnnnnnnnnnnnnnnnnnnnnnnnnnnnnnnnnnnnnnnnnnnnnnnnnnnnnnnnnnnnnnnnnnnnnngtttttgtttcaaccttaggtttcaggcaccgaaggtctgccgctaaaaggtgacaattatctctaattacacattctgtaaatcaatgtatttaacgactctcataagtatttatattcaatagggaaactaaagactactgcccgagacctaaatagcacctcctctaaacaactaaacaaagataatttgaaaacattatgtcgcttttcgtgaccgggagcgtgggaatcggttcgtatgtgaatattgaaaggttttggtggcataatcgtaacttgtccgccatgtctgaatgtgcgtctgggcagacccggaatttttcggaattggttggatagttcatgcgcgttttcgcgggcgtgatgttgagtatcgcggtggtcaaagcttatcgcgggactagcgatggacatttaaatagatggggctcccacctttgatagtaacctcaacaagaacattacaactacctatctcaacaggttatgagcccggatggcttcacctttgggcactcaagaatctaaacagcaacaatactttgcctgccattacagctaagcttctctatcagagactaactctatgagcttcagaaactgatcatatattctcagtaacttgatgaacaatatgaagtcctattgctcaaaccctctgggagcaataacgcgtttggactttccttcaccaaagaattacagacatcatgccatcattgctactgttacactgtcacactggcacggagtatcgcagggttgccccatagccggcgcatgtcaccgtttgcagcaagcttcaaacgttcctctgccaaatgatcataggtattacaccattattgctacggttacactatcgcactggcacggggtaccttcgagttgtacctacagctgggacatgtcaccatttccagcaaactcagaaactatcttcttggggccactgaccacagggccacctcaattccggaataaaaatgcggggaaaattacaaaagagacacttcgcgtcgtacctccgacacactcgccactggcgcttcaaacaaatccaaacgtcatacttcccatcactttctccgagcgcactcttgggagcctactggcgcctgtccactgaagaccgcatacgccgagcatcgaggaccaccatcccaatcaccgctcctcgcaacactgtgaaagacttcccaagtgcccccaaagctcaacctgcgcgttccagtatcgagcaagggacaagtcgctacagttgctccgcctctggcactctcacccggtcagaaaacaccattgagagtttggtcttggccccaccaagccctgcgggtggaggagagccattcatttccaataacagcaactcgagtcgttacaacctccggccaaacagaccctcaagcttccctccaaggaagccgggatatctagttgaccgacaccgtttccctcacttctctagatcgtataagtactctctcgatctacacaggttgtcagacagcgactatactcctccatctcagacgcctacgccaagttcatcagaccgaagcgtttccattgtttcaagccttcccagtaccgcgtcaagccttgaactcttcggcttggaggtgcgctctcttcagtcatcagatcgtgaatcggttacctctgatcggcccaacgacgtatctagccctgacttcttcagctccgaggagcatccattgccaacatgactgaaatcacaaaattcgagcaatttggaatcaatacgttttataatggaatcccgatactggataatgccagcgactggtttcggtggaatcagaaggtcaatgagttcattcggatatctgccgttgccgacgatggggcgactccaccgatagaagaagaagaagcacggcaatggattcaccgccaaaagttctattctgcgatgatcacggcaaagctgacacacaatgcggcgcaaaggatcaatgcctttgagattcctcgagttcaagtactgcttaaggcagtcaaggacaacttcaaaccagaaggctccggcacgtatgttactctccaacagcgatacatggcccttacaagagacaagtgtgggagcactcaagccctcggagccgagatcaggaagatccatgctgaaaaactcctccttgaccctgattgtgtaacctccgaaattgagcgaacatttttctttgtgcatgcactcggtccggagtacgagagcttccgcgatcatatcttccgacaaatggaccttgtcaatgaaagggacgcaaacgggaatgttacgaaagcggcgcccacgttcgactatatcgagaataaagcaattgaggaagaacataggaagggacagttgggcaaacaaacaacggagacgcaagcacttcctgctcttgccctggtccgtgggccaggtgacaagaagctcatcccgtcgtcggacggaactacttgtcgaatcgagatcgataacgtcccatattgctccttctgccgaaaaccttatcacgttgactccgaatgtttcaccaagaatccgaaactgaaacagaaagacggagatggaccgaagccaaagacaggcagaatacacacaggcgcacgcaaacagtcgaagaggcgaccttcgacggatgacgaggatgacgatgcgggtggcccaaaggatccgaagaaaccaactttcatggcgacgaaagtatccgagaaagatgtcaacgaagcatttggaaacgatatcgagggcaatttcgccatgctcgaccatattcccataatgatggcgataaagaccctctctacccgcgacgcgtggatcatggatagcggatgcgctcagcacgtctgcaatagtgcctcgaagtttgtccaaatggccaagtatcatggcccctcactaagaggcgttgacacctcaacggctccctcgggagtgggaacagtgaatatcctgtgcaatgtacgcggcagaaagaaatggcttgtgcttgataacgtcctctatgttccatctgcacacgccaatctcatatcggtgctccagcttctcaaacgaggggcaaaagtcgaattctcaagccgggatgctatccttcgcaacaagtcaaatggaaagaacctgtttactgccagcgaatatcatggagtctacgcacttgatctgtgggcaagtctgactttcccctcttaccatgttagcccgcaaatgtctctgtggcataatcggcttgctcatatgagtgatgcgaatcttcggcggatcaaaaagcaggctcacggtgttcgggacatggagccacttcatccatgtaattcgtgcctgcaggggcgaatgatcgaaaaaccccaccgcagatcaggaagtagcaggagaggagaatacgcaatggagctcctccatattgacgtcgcagggccatttgacgagggccttgacggcagtcgttactggctcaccatcgttgacgacttcacgagctagatcgagattatccctataccacgaagacaagagttcgtcatagaatcactgcggttcttcctcgaccacaacgagcgccccgagcgaaaatgcaagcgaatacgtctcgaccggatatctgaacaaatgggagacgagatgaagttcatgttgttctcgcgcgcaattcaagctgaggtgacaggcgtggatcaacatcagcagaatggggttgccgaaagagcccgtaagactatctatgaccgcattggacctactctagcacatgcaaggttgccgtctaagttctggccggaaattgctcgaaccgcagcgttcctctcaaatcggtcgccgtcatcgaaactcaacatgactccgtaccaagcgtggtacggcgacagacctgacctctcaagacttagagtgatcggatcaaagggggaatacttgatcccgccaaagcagagaaagaagctcacggatccgcgaacaagaccatgcattttgctgggttatgagggaaatacctactaccgtatcctactgggagacggaagaatcgttggaactccaaacgctgaatttcaagaagtccttacaactccctccacacagactatggaagatgtgggagccagacaagacggcttacttgaggcaacggctgctgccgcaggagggagtgagacggtgggactaataaaccaaccgtcggtaggtatacggcaagcatccgtgcctgcttcggggtaccaattgtcgatggatcccccagagcggcccctacctaagccgagaaacgatatctcgcacacactgcctcggagtgacgagaactcgcgagtgcttacccagccgagtgacgataactcgcaaactcaagcgtcggcccaatcgagtgacgatgactcgcagccagctgttgctgtacagggagacaggaccttgtcgtccacacggagtgacgataccctcggacctctatcacctgcctatcaggattctgtccttgggactgacttaccgtccggtggcgaccagcaacagggcgacgcggttgctgcacagggagacataaccttatcgtccacacggagagggaacaccctcgggccactatcacctgattatcaggattctgtccttgggattgattcaccatccggtggcgaccagcaacaccaacgagggccaatcttagaatggcaacgatattcagagctccatcggccagtccatgaagttcaacaaggaacattagattaccaccctgaactaaaacttcgggcttcggaagccacattggacaatcctgatggggacgaagagcttgcgctcatgaacgtacctgaagagaacgtcattccaaccttcttggccatggctgcaaaggagacggaaccattcgaacccaaaagtctgagccaagcaaaaaaaaaaaaacgacgcaagctggatggattgggaaagagccatgcttgaggaagtgaattcactccaccaaaatcaaacgtgggagcttgtggatcctcccaaagatcggcggttgctcagcggtaaatgggtcttcaaactcaagcgcgggccgcatggcgaaatcatccgccacaaaagccgatgggtagtgagaggattcacacaagaagaagggattgactatgaagaaactttcgcatcggttgtcaagccaatgagctacaaggctctcttcgccatcggagcggccctggatttggagattgaacaaatggatgtcaaaaccgcattcttgtacggaaatatcgaccacgagatctacgtcgaacagccccaccatatgacggacggcacgccaagggtctgcaagcttcgaaaggccctctatggcttgaagcaggcccctcggatctggtaccagactctgacaaacttccttcgcagccttggcttcgagccaatcaccgccgatctcggtatcttcgtccggagcagtgtgtacatcgcaatatacgttgatgatctcctgatcgtgggtccgagcatcgctgagatcaagaggatcaagcggagcctgagaaaccggtttcagatgacggacctgggcccatgcagctactatctcggggtgtccatccagcgagaccgtcaaaacaggagactgctcctaagccaagaggcatacattgacaatatcgctcatcaatttggaattgacaactgcgctcccgtcagtacgccgatcgaaacctcaccacttccggaaaatagtccagactacacctgctctccagatcaaaggacctcttaccaacgcattgtcggatcactgatgtatatcatgcttggaaccaggggggacatcgcgtatgcggtctctgtcgctagcagatctctctcaaaccctgggccccagcacatgaaactggcccgtcgcatcctgcggtacctcaaaggaacaaagaacctcagactcacctaccaaggtcagcttcagacactgagaggcttcacagatgcggattggggagggtgtcgcgccacgagacgatccacagcgggctatctcttcaaaattggaagcggggcaatcagttggcaatcgaaacgccagggcgttgttgccctttcaacctgcgaagccgagtttctagggcaaacgcaagccaccaaagaagcagtctggctgagaagacttctcaatgaattgaatatggatcaaggaacaaccgccacgatcatctgcggtgataaccaaggtgccatcgcacttgcttcaaatccacaataccactcccgcacaaaacatatggaaatccaacgcaagtggcagggagaggtccaagacaacggaacagtgaagctcaaatatatcccaaccacagaacaaattgctgatgggttcaccaaaccccttgctcgggaaagatttgagtggtttcggaaagggcttggcatcgagtgattgctacaccttatttatattgaacaagactaaggcgcagggcaccctttccttcctttcttcacaaatgaagttttttgaaggttttaatgggacctgtcgcaaccgcgagcatatggtcgctgacaccattgggaatgggttgtcatcgagtgggagtgttgagtatcgcggtggtcaaagcttatggcgggactagcgatggacatttaaatagatggggctcccacttttgatagtaacctcaacaagaacattacaactacctatctcaacaatccatattcgcggagtgcgaatatgaatatgtcgtttattcgcattcctttattcctttcggagccctagctatcccagcttcagaggtatcagttgagagattatttagtgcagggagagatcttttaaaagttcgaaggtttgctttacaagcagatactatgaggatgttgacgttgatgaaggacattatttagttgattggttgaatttattgattgattggttatattaagaaggagagtaattaaaatttttaaatttgttaaactattcgagggaatactgtacatgcatggatgatatatataatggcatgtcgtagttattactactagtggttggtgaaataactgactcctgtcagaacagataataccatattacaggcgctcttaagcgtgtgcacgctttttggcctagtcgcgtattttgctgtattgcacccccatctcgcgacaactcctgactagtcaggtgactatatactaagcttaattagggtagttcgccggtctaccgatattatcggcgaaaattcatacgatatttggtaaattatcggctgctgccaatagcttcagttattatcgtttatctgtatcggctcataaaattggcgcccgataattaacggccgataataacggccagataatatcggtaaaaaccgatatcgggaacagccctaggttggggtagtttgctccattgaagtccgtcttgggtgacgtatactgggagagcgagtaaggggatgggaaccaggcatcgtcttcagcttggtctcgtacgggagcgcggtcagatgagctagacatggtaactgtgaagttcttctgaatgaataggagaagtaatgagatgatcttctttatcgaagtttggtaacaaaaccactcgagttcattgatacagggcaagggcaagactaagccttatcatcgaattgctgcctgaatgcggtctctgtccttgcccgtgatgatgtcagtgatatagtctatgacccgcacaacttgtgagaatcaattttatcagcccagaattgggaatgatctatacaccgaagtccatttaatggtatacacgggttctattattgaattcggaacgattgcaactcccctattgttcttgagacttacgaagtgcggtgttctcatgccgataaaccttgttgagcggggttcctcacgtccaaaagagaaaatatgacttcgcactcgtaatttcgaatacggcagcctctcaatgcagcaaaaggtaacgttccagactgcaaagcccaagtccgatggcaaagtccgacggacgaggtattttgcctaacggtatttgaacctactgaaaatccatctgcaggactagtgagtcggcctattctgccaccgccagtcaaacgggcgtcgccgtatatctgtctcgcccagctaccccgcttctacacttcatcccaacgccatccggcagcctatcttgactcttatgatatcatatagtactgaaacactattgccactatgatcagtgtagaaacaaatttttatctttctattgaggtatgagttggtaagatttctctatacaccctaaatctgttcgggcgtagtagagtgggctgttcccatagtaaaaaagtcttggcaaagggggggaaacaaggtcaaactcgataacctcccctctctccctctctccttaggtatattaaatcttgtacttttcaatcgggctggatctttccgtcgaataattatttatttgttaagtgttggatcccctgtactgatggtattgtcctgttaccctaatacgcactatttcctagaatttccaagttttgagtgcaatatcaatcaatattcaaaagcaggactagaataagtgtaaagaatagtatcatattttggattttgaatgccaagaccaaaattttatgcaaaactgggttcaaactgggtctaaactgggttttctgggggcctagtcactggttcggggttgggctctaggtcgtgatttaggacctaatttgggttttgcggaagcctaattgggataatagattcataccttctcgtgatatccggtgttaatccctattggggagaccaaagtgaacccaccgtggttgtacggtctggtccactacagcgcacgaccgtacaacggaaggactataagtagatcgcgtaacataagggctttggaagtatctaggggtaggtgtatattgtgaatccagctcctatggctcgagctcttagggctgagagatgtcgtcaacgtgatataggctgtcactcatctacacacgatcgaagctgtagagacctgcgttagcttacgtgggcggttgaagctgtaaacggacggaacctatgagcgaatataaacggcagtagcgagtaggatccatggggtaacacaaatgagagccatattagcctacttagtctaccagagttagtcctctgcagcagcagtacagccttcgtcatgtaagaggtaaatgaagaaaagggctgcggaggaaatgaagaaaggcaaaacagtgggcagaatcaagctagatcgccagattctcctcccgcaccttcgagaaccccgcctagaacccggcgccagctcatgtgcgcgcgctgattggctgccccctggcataataatctcggtacagatgccaagcaccatcaaaggaacaaagtggtaaacaagaaagaagaaatgaagggaaaaaaaacaataatctacagcattggcccaaggtggacactcgacgaggtaggcctaatagtatgtggacaccgggagagtgtcatgccaagcatcttgggagagtcggggctttcttggtaaagaaggaaaaagacgaggaaggaaaaagacgaagaaggcgctccactcacaatgcactgtactgagccatcgtgaatggtgagatagggccaattcgagagtggctcccacgggccccctcctctccctctcgctctggctttcgtccctggggttttgctctccttttctccctcgtcctgaccttctctcccccaagcttgaagttttcccatccgaccagagggactcgtctctctaccacattcatttttagaaaacgtctgccacctctcgatttcgaacgatttcccactttgtgtctggccagggtgtccaatgaatcatatttctcgcattgtatgacttcacatcctcagaccattcattattacaaacagcttttgacatcgcattagcatcttcactttcttcgcaatgctcctcgaaatattgtcgctttggagatctcgccggcaaggccaaagctctcatacgcttcaggagaaacaggccccggtttctcaagataacaatggcgtcgagggtacagacactggaccccgggaggtcccagaagccacgccggcgaatgtagtctgagtcatagcagacggcttttggacttcgggccaatgatagcctttttcgagagtctactggaactgctgcgcacaaaagtagttcgttgcttttcgtcttaccttcgttattggttattgttggacttcaatttgctttgtatctatcttttagatttatctccaatcgggagcgttaataattaatatatctttgactgcactaaagcttagcctcacaaagatttgccgcttggacggttgactatggactgctatgtacgtttgtttggcaattgttacgccaaccatacaaggaggtacagtggcgtaacattaatatttgacctcaggtacatcggcccctaggcccacttttatttactgcccagcagaaacctaatgaaattaatccaattcaattcaactagtagctagtatgccaccctccatatttaataacatcagctacccggtgaggcatagtctccgataaatgcgcaaaaatatcaatatctaagccctcccaaacctcctgagcggcatccaataaaagatccaatgtagcttcgtgattagagagatacttcaattcagggtgacgtttcaatagctcagcctttagtagtgcctataggttctcaatagggtttaagtcaggtgaataaggaggccattccattacctcaaagcctagctcgttcaatgtgtcccagacaagataagcagtatgcactggcgcattatcgtgttggaaaatagcatagtgaacattatgaaccaacgttggtaatacacgacgatagagttcatcaattgtccgtgatgagacaccacatcgaggagcttctgggtctccatctaatggaatcaaccctgaacgacgaggttgaccacagaatgcagcccaaaacattcgtttaacttgcttccctcgcgatggaaccatttgaacttgagggccttcgactggatggtgattaagttggtctttggacgagtgaatgtccattcctggcgtgcaccaataccacgttcacttgtacattcgtcggaaaaatagacacaagcccagcctgaaggctcaagatgttgccatcttcgagcccaacaaaggcattgctcggcatggattggctttaaagctggccgacgcatttttttccatttgcgaagacccatctggtggtgaagacgccaaattgactgacgacgaaccttaaaatcgacttccgtaagtagtttctcggtcgaaattgacggtgtttcttggataataccatatatattatctctatcatcctcagtaaactttcgaggttgacctaggcgtgggagactctcttgttttggcgttttgactcctgggtaagagtatattgtatagtagagcgtggaatatcatgaaagcgcatctttttgatagtagttgcgccccaaccattggtatgatgtagctcgcatatcttagccctagttaggcaatcgagttctgggcctcttttacgtggagtgcgtataggaggcatagtatagggtgggtagtaagatattaaatattgtataaacatcgcgtaaaatgtaagacgcgtacaaccaagaaggtaggcggtcacaagaggcggtcaaaccccctatgtacccgagatcaaatattaatgttacgccactgtatagaatatgcggaggaggcgcctatgcatcaccggagccgcctgttgatacatcacctcctcttcagcttgcatacgcacagaggcatcccctttataaggaaaagctggcccctcttaggaggaccagcgattagtctgatttctgaatatcatcatactcatgtcaggcacatctcacattcttcactcgtatccttatcgtatcaggacacctccagggactgtcttaacaaagtggcgagcttggctcatctggaaattcatcccgcagtgttacagaatgagaagggagggcatccaagccatgctgtaaaccaaggtgtcagtaactagcaacgatctgcgacaaggacgtaacaagccttgtccagtaagcagtgcgtatgtctaagaggtcccccaaaaccttcatgttcccgtaatcttgcgccttttggacagtcttctaacttgtctagttgcttgcaattatgagtcagtatgaagagggccaccgccatctgagcctctagagccaagttatccagagatttgggaagcctaccttttcgttttctccttcgaccccaatgggtatagacatgtcgctcttacactgctgacataccggggagtcgccactgcacttcgttttgtgttgccgacaggattcgcaagcccgagacactcgccgaatgtatcgcggcgcaatgcttgaccgatggcggggaatggcaactttgccatccctagaaaccgccccctccgcccggctcgttccaagttgaagctgtcaaccaccgaggtagtctggagggaatcaaggctgggaggttcagacagcttattttgcatgccgttttgagacgctagagcctcgcctggtggtctagcagcccagatcaccctgggattaacagaaattctcatatgtgccacgaatatttcattgatcgtcatgatggcatgagacgccactacggagcgtcataatcctgatcccatgggtactgaagaacgtgtagaatgaccgagggccggcccgtggagtaccaaggtagtcccccttggtaagctcccatcaatgacatcatgatgtccgttgacctttacacgcgaagccaaggtacgagaaccgcgatattgttataatactgtactgtatcatagcgtctacttcctgccttcccaaggttccgaatatgacgaagtctttgacatcatgatagcatctccattgaatcatctttaccttcggctattaattacagtctataaattgtcttgtaagtgattacaggtaaatatttaaacagcaattaagtacctaggcactacatcaaattttcactttcatgttacccatcatacctccacgacttcgggaatatacagcatttagtcagcaacttgtaatctcaccatgtcgaaactctttggaccactcaacattgtgcacaaagatttaaagcaccgcatcgtcatggcaccccttacccggttccgtgcgagtgacgaccatattcaactccccatgacagttgaatactactctcagcgtgcttccgtcccgggaaccttgattatcacagaagccacaatcatctcaccaagccacggcggtgtccccaatgccccgggcatctggaacgacgctcaaattgaagcctggaagaaagtagtggatgccgtgcacgcgagagggtgcttcatcaactgccagctctgggcacccggtcgggcggctgataaagccacactcttgaaagaagctgggcatgggcttctgtcggccagtccagtctctttgacagattgtgcctgtcagccccaagccatgtcggaaagtcagatccaggacgccgtccaggattatgcgcaagcggcgcggaatgcgatgaaagcggggtttgatggggttgagatccacggggctaatggctatttgctagaccagtttttgcagaatacctctaaccagagggaggatgcttatggtggaagcgtggagaatcgcgcacggtttcccttagctgttgccgagggggtcgttcgggcgattgggccagataaaattgggtaccgtattagcccttggagctcgttccagggcatgcggatgggccatccaattcctcagttttcttatctggttgagaacctgaagactctgaagttggggtatctccatgtcattgaatcgagggtgcacaacaatgttgatgtcgaaaagacggagggaatcgagtttgcgttggatatctggggaaagacttctcctgtgttggttgctggcggatttacgccgaagtctgcgaagtatgcagtcgatcaagagtatccgaacaacgacatcggtgttgtctttggaagatcttttctcgcgaacccggatttgccatttcggattgagcatgatcttgacctcactaaatacgatcgatcgtcgttttatgccccaaagcaggctgaagggtacaccgattacccgttcagcaaagagtttttggtttctgtgtcaggataggcatgctattcaaggaatgaccgacgatgagactgggatagccgttcaatttgtgcagaatagaaaaagagggttcgactgtatatccttcaaatcagcgctatccaacccctagcagaccaatcagccacaatatcaagctcctcagtcaccaacacaatatgtcagaaatatggtgaatttgcatgcggatttctgggtattcacccagagtatcttacgacatcaatatcaggtacctctcataaaagtgtgtcggaacgtggtcgttacagtacgaactagtacgggcatagccaattgagtacttgagaatgtgattttgaaaataaggctataagagaatgccctgaaacggaggaacgtagtgaaagggtttacaaccgtgggcctgccctgaaacgaacgaagtgatgagaggagggggaaactaggcctcgccaaacgcgggttcggggcgggtttttggaaaatctgttggtttattaagtgatgcttcaatgctcatattattgaggggagttgattgtgtgttatgttgcatgtattgtgtaagatacaagtagactgagaagtcaagtatatgagtatgcatgtgatcccaacctcattattatccatgcaaccagggtatctcaacaaaatcttcttgcgtacccaaattacccgtttgtacccatggaaatgtgagagtcgggaagcacaccgcgttcctattggacgactaactccttatatacagctgactacgtcgggcgctaaacccaaaaggggagagggagaatcctaacacccctcgaaccgacacaggaagcaaaaggacagaagcaaaacatcccaaaccagaacacagccaattcgatatgtccattcagaagaccccaatctggcccccgaatctcttgaacgattcctcagccagtggcttcgtgaaaccgtcagctgccatatccctcgtgccgattggagtcgggttgatgatacccctggcagcaatgtcgcggacgtaatgatatcgaatatcaacgtgcttggaacgcctagaaacgaatgacgttcgaacaagatcatgggcacccttgttgtccatgtaaaatgtaatgggctcggcgtctgccgcatataaacccatgtcggccaccaacctagtgagccactcgacctctctcgcagcgtcggagaccgccatatactcggctttgttagagctcaaagccacagaagcctggaggtgtgatcgccaagataccgggccgccagctagaagcataacgtacccactacaagaacggcgtcccggtgtaaggggaccgccccagtctgcatcggtgtacagtactggtggaggcaacattccgctgcctggtctgaagactatcccaagttgtttggagcctttcagatatcgaagaaccctccgttgtgtggatagagtcttctgtgttggtacagtgttgaagtgggccaacaatgttggaactcttgcgatttcaggtcgcgtatgggatgcaagccactgcaatgaccccgttacgctctgatattgtctcttgtcaatactcaggtcatgcaaatcgtcaatgaccagacccggttcaatcggagtggcaacaggatagcaatccggcattcctgcatcgtccaaaagcttgtcaatgaagtcaggctgcgatagcttaatgcctgcttctgtctgttcaacgcgaagcccaaggtagtgctccatttggccaaggtccttaatagggaactgttttcccatttcggagaggatccattgtatctcggtgcggttggcaccgatgattccgaaatcgtcgacatgtgcagtgacatatagattcggtttcgtcttgtgaagaaatagccctgcatcgtaagggctgattcggaagccaattgcttccagtttctcccggagggtgtcgtaccaaatccgggctgcgggtataaggccatagagggcctgtttgagcttgcagacaagagtgcctctctcgccctgctcgaatccatacggttggcgcatgtaaactgaatttggtagcttcccattcaggaaagctgtgatagcatcagcttgagctatatgccatccataatgtgcggcggcagcgaataacaccaattttgttgatgccatgacaaaaggtgctgctgtttcgccccatagggattgatgtccgttggaaatatttccacggatcacccaccgcgctttatatcgcgtggtgccgtcgactgcctgcttcttcgcgaatccccacttgccagggataggacgtagcccaattgggacgtccccagtgcgattcaattcccacgtgttccgtttgtgcaggtcgtcaacttccttgcgacatgctgcgtcccaaaggacccgatcgacgctttccatagcttccttgaagcttcttggcacatccgctgccgactgagatgttttggtcatggctgcgaagactttgacttctttcgcaggtcgtacccaattatcatcggtgattgggtccgtaagctcctcggagctcgttgaatcaggcgtttgtttagtcacttgctcccccccttggaacggggtttgtctggctgcgcctgtcggccgaatgtctccagtgttgaagaggcggccagtctctggatcccacacggtgtagatcgaggcaccattgtatccgacaacgcgtcctattttccctcgaggttctagctttccggtcggttcgctcgtgccatggaggtggtaaaaaatgctcgaaccgaaaggaagcaggtaactcaaatcagcagggattttagagatcgcttcgatcgggatcctggtgtcctgtggctggatgctctcatcgatcgtcgttccaccaggtgtggggttattttagagaggagtgctcgtcggggatatattggcaaggaaaactgcagcgactagcgcgtgaaaccagaaggtcattgggagacctgatgctatccacatcgcgcgcgccttctctaataccactcgattggcccgttctgcggtaccattctgccacgcagaataagggttcgatggctcccactggcatccccactctgtcatcattgattgtaattctccggatccgaattcgttgtcagatcgcagaaaagcaggtgttttgaatccgagattgttgatgtgctgacgccaataccgcagacgtgcagcaatttcgcgtcggtctcgagagatcagactgtaaatccatcggaatcgcgtcgcatcgtccgtgatcaggagaaaatatttatagccatgccgggactgcagatttgccgcttgagaagcgtcatcatcatcagagaaaacgtccccgccacccacgatgtcaacgtggatgcgcatcaatggccgtgtggctctcgaggcctgccgacgactgtatcgtcgggttatgttcgcttggaggcatacctggcaaggcggttgggccttgtcgcctgtgattttcactccactgcctggacggttggcaaggtagagtacatctcggtaattgagatgtgcaagcgtgacatgccattcccaaagagtcgtagggaaagcagatttgatatcgatcgaggcttttgaaacatgctcatctccactagatggcttagccttaatgttgctctttgcattagagctgaaataagcgactagctgctgttcgccagctatcggaatgggttcatcagaggtcaatcgtgaattagcaggagttgctattataacgaaggcctgactagagacctcaaatggttcatcagcggtgaatgtgtaaacatcgcttgagtttcgaacggcaaagaatcgctggttcgatggatcctccaagacgtagtggaatggaggtgttgatctcttgtgaaataaatccctgatcatgcagaagcgcctctgacacaaggttggaatccgctccaggatatggcggacgtctttcagagtgacagttaggtcatttagcttcatattgactgttcctgttgagtatcgcggtggtcaaagcttatggcgggactagcgatggacatttaaatagatgggattcccacttttgatagtaaccttaacaagaacattacaactacctatctcaacagggtggacctgattcactgggtggagattcttcggcaacaagatacgatgcttagatatggattgactcgaggcttctcttgtgttaacttccaataaatgtgctgaattgacgtcatgaatttcattatttagacatgtgctttttattacttatgattcaaaagaaacaaattctaagctactatagttcaaaattcatcaaaagtagctgtcgggacataatatcccgttcttggtgtacgcgttcttgcgcggagctgcggctccggtgttgtgaccgccgagtgtccgtgcatgggattaaggggtagttatcttggaacctgacctgacttggaaacatacatacaacacatctatcttacatgaatcaattgacctttgctttggaagcataaccactgtccacttaactgtgtacacagtacctagctggtgataccaacagttactttaggcatcgccttaagcagtttggccgccactgaagggcaataaaatgcaactgatatcggaccgatccagccaaatattatttgtaggacccacgtataggatacctcgttttcctctgacatcagacaaaaagcaatactaaatgtagtattagaaggagatagaccaatcagatgaagagaggcatccgaaagcgattagtcttataggtacaatccataagaaaacccgattgtacttgcgggcgtactcaatcgatatcggatgggcaaagatcagttaagtcaaattaccgctttcgtcctgtttgctatcataaaaccaatgccggcttttaattggttctcaaggtattgtgccgacatcatatcccctacaatttcacgttcaaattgtttgtttaggttgtataggccccgagataagaaggtcgggatacccatttcggatgagatgaagagtgttccgggtgggggtaccgacgtcaagataagctttaacctttgctttgtgctcaattttttaatcgtttcgtctgggccctcggatggttaattagctcagcgtgatcgattgtatggttatgaacaagatgggaccgttgcacgtgccatttaccatgccatttatccgaatttgccttggccgagcgcatacaatatatccaaaaagggcaattatcgaccattggtcccttctttttgagtggttcgtagtcttccggcttatctttaaaccatctggtgtcgtatttaccaccgcgatcgcatttcatccgaaaattgcgcccggactggacgtgcgagtaacggcgacgtagccctgcgagatggcgtaatcacgtaatgcctcggcatttcctcctgggtgtcatacgattggtcaaatggggtagacattgcgtcgtagtgatgtaattattgtgcaattgtaagcgaaaattgagataaatatagggtacactcgcggggattattattattattattaattatttaacgtcgccggcaggtcacttggcaggtgacccgctacctcccgaggggtaactggacgtgctacctaagcgatgatttactacaactagctagctagctcaactaaatacacgctggaaagcagcaaatttgagcacaacgtgctgagaaaggaatcgaaggagcgccaggcactatcctggcctgggttcctgggggtggagtacccggtctgacacccggtctgactacccgcggatgggagagggtgccagcctctcccatctaggcagaggtgaagactgttgcgctatgcggcgcatgtttgtgcccgatttggacagatatccttaaagaaggacgtttcttgcacgaaacggccgaattcctcggccccagcagctgtgctcagtatccagtctatcattgcagatgggctggcctttggacctttccatcgatccttccagcgtttcctcgcaggcgggcagaagaagaagtggacgggggattttggcttaccgcaggagcaggtcgtaggggagtccctgtgatggaacctctcgtggtacacctggaagtcaccatggccagtccgcgcggctagtagccggccgagcaccccgcggggaagccggtgttcccgagcgcggctgttcttggtgtgaggttgaatatttaggtcttggtatgcctagtatacgcaatacgcgttgccgcgcgggtatgttgtttcacttcgcgcattaggtaagatagggaagggggaatatgggagccgtctaacgctgcgcccctctttgctagctcatcggcagtctcgttccctgctatcccggagtggcctggcatccagcgcacctccacgggcgtgcggggtgtgctgagaatatagggagcagacttccactggatggtgagctttttgaataatttcgtgagtttccttctgtgtggcgcaggtctcccgtccgcgagtaggctagcgacggcgaggttatcgagcaggataacgaggccggtggagtagcttgcgcagggtaggtcgacagccgcctggaggccctctactgcccccataagctcggcgtcgtacacctctgtctgggagccagctgacccatacccttgggtgatagggatagggccgtgttggaatatcccggtcgctgagataataaaaggctgggatcacgtgcatacattcacctacctcaagttgcacccccattgttccatcaaaaaaaaaattgcgtcgtcaatgcgaccgtacgctctagacctgtcgacctcccacttccagctttgctcccaggatcatttcattaatttgccccacaatgacccttcgtgcttgaacctctggtaggacgatggcgagtttgcgaatctactcgagaggtctgcaatattgtcctgtaacaaaacaaatcgagagatttcatgttcagtgcagcaacgagatggatcagttgatacttcctcttttcaacgagtgcacaaatgaaaaggccgttccgagcgtatactgtcaattctttttcgccatcgttgaatgaggttgattaaccaccacacgctcccaggagcctactagaataccatgtatgagcctcacaggcaattttctcagccaaccatgtactttgagctagagggggaactcagaactcccaagagcacccgcgcctacccgtctcataatcctgtctgaagtgataccagatatatattgactcacccctagtataagaattccaacatccttctgccgtctgtactaaagcagagtaaagctctgccttgagcatctcaccatgagttcgatcttcgcaccccttggcttccttggtccacactaactgatcgtacttagagagagtcagtcctacctttgcgacctcgaaccagtcggtatcataactttcaccacccgggtcacagagcgaagcatctccacccatcgggaagctccctagggcaccgaatatacatccggcgcttccaacttgacagggctgtaccatcttttgttgtccgtcatacatactgccctggagagatctgcatcaccatgaggtcagccagagcctagcaggctcaatagtggataacgacatcatcttcagcgagaattctggcgttgggtcctagacactgacgaaaagattacttcctacctgactgacggtattatgcgcaagttggacggtaatactcttgatccttttttcttcggtgatatggcagtgcgtttgttgccgcacctatgggaaagcaccagatacagtgagtctcgaaaccggtgcaccctccaacactcagagagattctttagacccaccgccaagatgacactagtctattcctagagtcttccgaagtacccctgtagtgaaggcggttgcaccggtttcgaaacgcactgtacaacgttggagaacctcgattcgtgcgtaatactgagctttttcgcacgcaagccccccccccccctcctcttctcctcgaataacgaccggctgactgattttattcaccagcaatgatctctgaccagaagacaaacgcagggttagctgtggagagtgagatcttgccaaaaatcgttgaaagtaaagaaaacgcaatatcaagtctgacatggaaagctcgcttttggaacaacatcatcacggcaagcttccaactgtgggctgaccgtttccctactctttggctcctgagatttatactgtacggaaaatatatatcagccagcattattaaattcctacgaaggttggcagtctttgctctatgacatattcccagtctttcttgcttcttctgcaaaaacctgctggacattttcaatcggcacaagtttatcttgtatcgcaagccaccgcatctgcagatttcttctaccaaattgggacgtgtacgccccatgcagctttggattcttccaaaaaatgaaagttccatatttgcagcgtgaagatgtttccaactctctccccagtccaaatcgctgatgccaatttcatctctctttagatttacattactgtataggataaaaatgcagcaagaaaagcgaggtctcaccagaatttcgagaccatctttcacagcaattcgaccgtcataatttcaggagtgtcctactcaactacagtcgaacgagagaaccctgcatgatattgtcaggcattggctctaagcgcaagcgtatactatgagttcgaagaccaagaagacgcatatctgtctatgtgcttgaaaaatcacattgctttggctagagaacggtcgcgaattcccagtatatggcatcggctatggcatctctcgatcccggaagcttacttgcgaccgaggtgaccatcattgccatgccaatgaggttctttgcaaagaccgggacgcgtttgattgagcaatgaacgcccttactcaatgcgaaatgtggtaatccaccgatagtcgaaatcagaatcgcctcaagtactttcctacttcactacaattcgatatcattttcgcgcttcgtcatggctgctttggcgcgtaagggatacacggcatcggtatctctctctgtaaggtaattaaaagtcgaaatcggctaacacagccaccgttttaatacaggcaagccacagtggactttattttttgatacataaaacaaagtcagttccgtaacataactgcatcatacaacggtattttgcctaggcccttgtcatttggtatgaactactcagatatatgcgaaatgaccattttctaaaagattgatggttcaagcctacgcaggcttagacgcgttttttttttttttttttttttttttcttaattgggctgtaatgattcttggccttaaaatgaaaaggcaacctgatgtgaatacaatttcattgacgtggtttcatatggaaggtatccaacaataatctccaaggtttttcatgcggactaacagggacaaagttgattgttgaagcctggatttggtgtttcctcaaatacttgagatcaatgacgatatttgctaacagtctgtcgatcagacagaatgacacaggtgctcctagttacattttcgattccacggctcgtttaaatcttatcattctctttgtagctaacatggacccgagtcattcgcaagagcacggcaatccgcgcggaacagtcagtatacgcccaagtgattactcatcaattctatgaagtactagcgaacgaatctacagcagagcagtgaagctaaggtctacctgaaggctgtctttgcaaatggagatattggctcatactctcatcccatggatgatgtccagacaaatgataagcgataaactcatgataggctcggtatgaggcaaagtgctagtctgtcaaggccaaaatcagtatggaggataatttttggatgttattgggacatctgcccttcgttcgaccgttcatcacttccccactcacgtccttatttattctaaaccgactgttcttaaccgactgtgcttgaccgtttgtgcttgaccgtttgtgcttgaccgtttgtgcttgaccgtttgtgcttgaccatttgtgcttgaccgtttgtgcttgaccgtttgtgcttgaccgtttgtgcttgaccgtttgttcttgattgtttgttctttatttttattcaccaacaattgctggctgtttaacaactatctgccgtcaaccgttcaatttttaggtttagttataaaggtgttatttgagaacatctatgtcagaaaatttgcttgaccgcaacctggccgagtcagtggtaaccgcagccccacaaagcaattcgcgataataaagttcgtgttaagcagctgtagcagtgcaacaaacaaacaaacaaacaattcattaacgcccggcggctgaaccgaaagggcaactatcgctgatctactgtacatgtccatctgtacatgctgtgtctcctgaaagcccatacacaaaaccttatcacatatgacattttcaaaaagccgtgtcgcagcgagtttctcgtgagttagtaagtgggtgagtagactggcttgaaggcgcttcttcaagtgttcaacatcctatcttcggcagttgaagcgcgtctaccgtttgtcacatggttttagggctagtaggtgggggggtattctaaccgcattcgttggctaggttaagtggcctcaagtcggccgtagcaatcgcaaatcgtattgaggctcgcactgcttccaaattcggtttccacttttgatcatcggagggtggcttccctcctaagaagaaggacgtattacttcggtgagtgtgggtgcattgcagcatttccttccggtgggcggtctacttccaacatcgaaatagaaatagaaattggtctacggtctctctcgcttgtccacatgtatattgacctgtctcgacggcattgattcgaaagagatatccattgagtcttgccaccgttgttaggctgcccctgtggcgtacgactgcgaaacctctataacgcctcggcgaagtccaatacggccttaaccgtcttcgccctcgagacggtgtctagattacctctcttaccttcggttgagccttctaatagactcgacacgctatttaacgcgtccctaaccctactccttaatattatctgtaaatctcgtagttttagatattctaataatatatagccgaccgtttcctacgcgccgtacttatagcgattgtcgtctcggaagctaaatttcttagcatatgtgaataactagttgtagcctatacgtagctaagtgagtaattatactcggttcctaggtaggttcccgtatagttttctagtatacctcgctggtagcacgctatctaccttctgtagatacgctcctttggtacttaagttctactcctactcctactaggcgtaaatcttactacggagaaagacgttctctcttattagtagcggccggaaaggataggttttacccggttatacagcttctttagcgagttgatccgcggcctcgttcccgacgattttatagtatcctagtatctattagagacggaggaaaatatactctgcttaaacctcggtagctacttagaggattatatagataattcgttaccctaatctatttcttacgttctagattacttataaagcggatctactattgtagaggattattactattatatatatatggtctccgacgcttacctattagtaagctaacttaaataccgtactgactatatagaagatacctataagttccgctatataaaccgactactgttctatcgaccctacttatacctattaggattctattaccttattattatcgtttagggcgacgatagcggctcctagatgacccttatgcccggaggtgtctgagtagacgattatatctgatgtatcctttacggacgctgccctatctctcgctatctctcgatctagtttaagcttaatctctataaaggcgtccttttactatagtagtagtgggcgtagattaattgtctctaattcgttaagccggtcgatatctatagtttttatcgcttccgctagaggaaagcgcgcgtacgaccctatattatttctacgattctaagtatgtgataatatactcctaatagggtagttacgcggtagagtatatagtcttgcgatagtatattacgcgcgatagcggagacgaagttacgtagggagtatataagcttctacctctaaggtcgcggttactaccgtcctaaacgccgataagattctaattagtacgtttctttaaactatatttaagtatcggatataaactttatctctaagcgggttatattagaccgtcgatatatagtctactataggtataatatatacctagtagagctatcatatctgcttagggtgtaagtatcgtagtctacttaaggcgattgctgttttagtagcgcgcttaataatctactagatatactccttctagtgaagtcgctagtcgaatactacccctagtaatttagctataggtaatagcttaacttcggtcctatcgaagatgattcgtccgtctctatactctctcttctttctaataaggtagataagctcggttttctctactataaagtaggatctagttctctatacctacttttcgatacgagggatatcctcggattatatcttagtcaaattttctagaactaagccctctattctctaatagaagtagtcgttaataaatactaatatacctctctaggagtcgataggctagtcgactaggtcggtattaaagaatataaataagataggggaaagtagtgatccttaagctagcctagcgtttactagcggagtagtcttagtacagaagtcgttaaacctaatattagtgtactggtagcttataaagcttaatatctattttctagctataagcgggatccgtcttacctatagcgacgtatttaggcttatcctattaactctattaaaggtatcttttaggtcgaaggcgattagggttactaccttatacttatactaggctttatcgatcgtactagatagtactagtagggcttacttagtagtcctacccggccgcccgccgaactagctattaggtagtaggctatacccttccgctatataggataactatcgggctattactacctctaggagcttactaagtatatttaaaagtgagattaggcggtaagtactaggggctaagtaatccggcttacctagtttccgtaagataatgattttcgcgctcctctactatcttaggtagtatcctagctctatatatactataaagatacttataataatagcctttagatgcttctaaagcttcttctagactagtatcggtaagttatcttccccgggtatagtattctctttagctacttttagtaatcgctcgatctctaatttagtaattgggtactactaaagttccgtctccgttatagtgggtaggctgatttctggtatatttatggcagggaagaacgtatctataaatgccctcgctttatctttattttaggtataatcctctgagcctatttgtagtgctgggatataaccctatatctctcagggctttatatatatcgcggccttctagagcttccctttactagctttatctaggaactacttctagtacaaggacttggctttctcgatggtccttgtccacacttgtcgtttctactgcatagcttcgaaggtagccgtggtataagcgtgctctcttcctaactcggcgcagtttgcctgctacctcctacgtagttggttgactttgacttattagatcttaagatctggcgtgaactatcgcttagagtatagcgtggggcatatatcgggtataaaccggttgactacctaggctatcgccgctataagggtttctactacccggtcgagtattagccgggtcttaatctatttctataggtttatctgtcagactacttcttcaccaattctcgcctagtccgcgcgctcgtatactttcttaggttttatacttagtttactctagggttataggctctattccgagtaggtagtacggtagtctgatctatagttcttataatataaatggtatttaacgagtaatcctaggttatttattactatctagtcgatagttaagttctatcctagattatttagagcctagtaagttgccgttccccgagggaggtaactagagagattataagtttagaagaaggtgattagatcgctagtatctttaataaatctaggtaggatataattaccgccctatatcggataatatcggttaaagtcgcctataataataatacttatagagcgttacttattctatacagcagctgtaatagtatttactattacggtaagcgccgggattactaatacgttatcggctataaagagcggtactagagatatatagacagaaaagaaaagagtttaagaatcggccgtctagatcttaatagctacaatatctaggtggttgtaaggaatttgacggtataaggaggtagagattcgtctattcacgtagataagactacgaaaccgaactacgttagtctgcgtggtaggacgataaagtcgctaggcgctatagttgatatatatatagtaggttataatcgatagctcttagattagaaggatatctaggtcttagctttagtagtcgttaataagtacttctattcttagtcctgattttataatatttaactgaaggatacataggttgctctctaatatcagttagggtaagaagtcgcgggggttagatatcgtcgatctccggtagcgtacttacccctatagtcgaggtagcgggccctaattcctagtaggcagcgctactgctcgtattaacctatatagtatccgtactgcggggtctccttacataaccatactaggtatctaaactattaataccggaaatatctctttttcttaatctcgtatcgctctacctaagggatatagtattaactaataacgaaaccactacggagtatatatttagctccttctatagagtcaaactagattcctagcgatacgaatttccctagggccttatctttcgattttatctaggctagttcttcgatatagaaactgtattctactaggtcgttcttatagataattttttccgctatctaggtagtacctttttctagattgaattccttagtaagggtacggtatactataataccgaaacggggtttgactagcttcgtattattacccaatttatatagctactaagtattattactagctacctaagctaactctacgttcttaaatcgaatgagatagccggttttagtagtaccaattcctactacttaggcgtcttatattatagcgtcgctctatagtatagaacggatatggttattaacagtattagtagggagatatcgcctaaacgcgtttctattgttattatcgttatctcttaggtctatagaggctctctaggtactaattcggacatagttttactctttctcaggtttctaatagtttagcgagggtatagtattatcgctagtagctacgactgctgcctaagtcctagtcgcggtaactgtaggggcgctttcaacctatactcgtaacgctttcactttcttataaagcttctcgttcttttcttataggatatattaattatatttaatctcctatagctcgttctaagtggattcgataaccgcggtttgatagcggataatatcttttagggtcccgataagtttctatacctctttggtagtaactcgacccgagttctccgatagtataaatatatcgccgctctgcgttcgcttatagctttcggtaggcgatccaggggatccgatatttactctaggctagaaatcttctaccgagaagctagtaggagtttcttaggtatttataggagggggttcgggccctcccgtaggtaggtctatcgtcggtccagggttagttcccactcggcacacaaccatagctgaatatatatatcgaaggtagtatcaaccactctaaaagatctcgaacctttttctcttggtacagtagaaaccgaaaacctgaagggtatctgttttgggcagatacagacgcgctcgaaatcagtttcaccatttgactctgtttgattctttcctgaactcaatcctgaaacacgctagtctctgttttaatttaaccaatttcaaaatcctgaatcgtactgtaacccaaaatcacatgatcagctacgttataattaggcctcgccaaacgcgggttcggggcgggttttcatttttccaacccgcccacgggtaacctatcgcgggttttgtatttcacaaacccgcccgtgggtttttggaaaatcttcgtgggtacccaaattacccgtttatacctatcaaaatatataactgatacataggtaacccatcgcgggttttatattttataaacccgcctatgggtttttagaaaatcttcgtaggtacccaaattacccgtttatacctatcaaaatatataactgatatataatatataattagtcagtctatatatttttggtaatttattttggtaccgatttaatataagaaatataatctaataagataaaatatctacccctaaatatatatattaataatagataatagctatactatattttaggccgattgtctactaccctatattttcggatactataaccggataccttaaatttaagtaggtcctagttatataagtatcttctatattagaattgttacccaatcgagataagaaagctagttagataataataaatatatacttaaggtcgtttatagtcgcgcgggttttagatacctataggttaatacaacctataaaatacgttagaaaaaaaaataataaaagagtcttaatctaaggtaatagtatctctaactatataatactacgttagatttaaaggctaagcctcggttacgttgagatttttagaaaaatatcgtcgctattaactaatcgatctttaagtcccttacccttaattaaaccgtcctccgattccttcttagactctgatttccaatcctcagtataaatattaagattatatatacttaaatcttacccccctattcccgacgcgagcgaatatactaagtagctatatagccttttagggaaccccgatagagtagtatatttaattaataacccctgctgattctaaaacgcattagaccgaaccgtagaaagaactagatcctatataaattagagaactcgattgactttctaatatagtaggctaaaacggaatacaggtaagtactaaataacgaaggccgatctagaattaagtagtggatagatttatattataccgaagtttagggatacttcgactaagttatagatatcttaactagccgacctaaggtaatctataggtcttatttaactttattagatcacctataatataagaaatataggataagcgctataggaaaatattagagatctaaggcttatcgatagggctagaaaagatcctaccgttagatacttataataaactctatctagaaggccttcttaggagctttatctaattataagaaatttactaccttatagctcgaagaaaggttactaaagataatagcctatttacgattgcctttttagactattaagaatcccgagttcctagtactacttaatttaatttactccggcctaggagaattagaaatctctttagtaaagactctataacgttacttatataactctattatagtctaataggagtcttagttacgtgacttacccgaagatataaaagtttcccttatactagattgttagattagccctttttaataagcgtttatagcgattatagtatactttatcgataaagattagaactatcgtaaaatacttcttaggtttaagcctctatacagagcttatagtagcattaatctaaacgaagtacttctttaattacttaaggatagataacttctagatcgtatctttagtataactatagataatataataaataacgagactcttatctaagccttataggagttacttttattaggcggcgctattagtacgagagaatctattatacgtatactatatatagcttatataatttagctttacctaaagtaactgctaggttatattaaagccactctaaagaataaagaagtaagaaggttttagtctaatacttaagctatctatctaagagattctttagagtatagtaatatagcgtatactctcgtaaaggtatatttaacctagaaaaaaaagactataggaacttttattaatatttttcttttaatagattcggttatttactgtctttataaatataagcttataataaagagacacctttttatatctttaatcgggtaggactcggcttttcctcttctataatatatagacccactagaactctacttttttaatactttaaagagcgcgctggcttaggaatactattaataaatactaccgagactataaatatagctaatttaaagttatagatactaagtagtagtaaattgactatatagttaatctaataaggccgttctttaaatttactatagctctaataaagactaaagatataactatctatagtatctttcttatatataagaagcttctagaatatatcgaacgcttaaaccggaagctaagaaagaaaataataccctagaaaaaagatatatacggtactatacttatagtaaagtaaaagttaaaagattattacgagaagacttattataactatagatttctctatagtatagtggctttacttactccttagtataagctttattatatagtattaataaagaaacctagagatactattctatactatatagcgccctttattataagccttagagttagaacggcttcttaaactattatatatagtagaaataagcgaaggagtcaggtataacgaggttaatcgttatctctacaagtataagtatacctagcttacttaatctaaaagaccgctaataatcttagcgactaccttaatactaccgcgtatatattaaagagagaataagagtaaattccctatactttcgcgactagctcgtgatttactctcagttctagctactagtataggagttaaaaggctatttaatagtacctaggatatttactattatcgccaaggatctctaaataaaactataatataagacttgataatatatatatactctaagaaatttaccctagagagctagtaatcgaatctattagattataggacggcggaaggggaggattaggaaaatctcgaagaatataaggtaaataaggagaataaagacgaagatatagctattagtaatatagacgagagcgaattagccgaagatacctatataagtcctactacttagagtactctaggatttgaaagtattaccttataggaacttctgtctcttaatcgaccgtaagatacaacgataaccgctattcgtctagacctagagagcgacgataaagatctattactacctctagttatatatctagaagagagatcttaaaaaagattattaggaaggataatagtacctttaagccggcttaaaggctataagctatattagtttatctgctatagagctataatttgatataatctccttataaaaacacttatcctaaactataaacttttaaaactaggctatgattctactatagttaaggcttttctgaaaagcggtagtagcatatagtctactcataccggggcaatatattgatctaaacaaataattttacataattttgtgctagctaacaaatccttctcttttgggagtcataggtaatttgggtacccgtatgggtcgcgggtcgggttttcaaaaaacaaacccgcccacgggtctgctgactaagacccgccccgacccgtggggcgggttttcgtgggcgggttcgggttttggggcgggtttggcgaggtctagtaattacataaagacaaacagtacgagcagtataacaaatgtaatgtggatccagaggttattagctccagcagatcaggtgcggcgcaggattgccattcccatttcattaggtagcggtatcgagatgtagtttcagccttcaaagcccagttgctagtattgataccttatcaatgagaccctttaaaaaaattattgcaagctttatttatgttaggatggtagtaaacaagaacgacattagcttaaaaaatttctttgaaaaagcgttgcgacggccatgggcggtcaggccttctttcatcggtcaaagtggatcgacttatcacttcaccatctacaactgcgaatgataatcaagttcattggcatctacggcatcaaaattggcgaaaagaaagcctgtcatgacgcttcatgaaattcaagcagaattgggattccaagtcgagctacccaacgatgagagttaaaagaaacggttatatgcggatctctcacctgtcccaacaaatgttacggaaagggtcgagaaaaagctacaagaacaccaaagacagagcctcttaaaatgccatattggccctgaaagtctgctttcagggttaggcgaggttcatgtatgtatgtttctttcgcccactctatttctaactcaacccggcttttggctaactagagtatagtcacttaataccgaggaagctatcattgcaatgcagcgttctagtgctacaggatattatgttttcttattggacgttcggttctcatttggattggaactatgtctccctttgacgggtctcgaggacattcgcgttatgataaatgcaaaggtatataggacttatcctgaattgaagaatttaacagctcaaggaaatacagcatcaaagaaaccccatcaatatgacttgcggcaactggggggcacaacttccgcacgaactacgattatatatttttcaactcgccattgaagaccaggagtgagaacaaacagatccacctcatctcctggaaaggctttttgcagactttattggaaatccaagtggatttggctttccgtcaagtcagaatactagcgctctgtgcgtcaacaagtggatgcgtcaggaggcactaccctttgcataccggtcattccgtttcagattcgacggtatggatggtttcatcagatttgcactttctatcggtcgaatagggcgcgaaaatgtggaatcgttggatttgtcttggctcagctatagcgagatggaagccacgtcgaaaccctaccgatttctatatgcatttgccgtctcttcacgcttgaagatgcgtatatctattgaagcagctgaaaagactcagaatcttatgtttttatttcaatgaagacattctttccatgaccccgtgcgatgaatttaaaatcgaccctggcatccgagagccttcttccatctcgggtctgagatctgtcgagatcaagggattgggcgatcagcctctagagtccacctctgtctctgccaagtggttgaaaccacggttggaggatcaaactcgagctaccagctaagatagactgctgaatcaatatatctgtcacaacgaaaaaaaacgcctgttatttaccactcggccaaaaaggtgcacactttcttagctaaggtaagtatggtgtattttatgcgtattcttgacttgacaatatcctgatgcctcaggcatcattcaatagtcgtcacatgatttagcatcatttcgagccacatgcggaaattgcgagtttccctatctcctgtttcgctgcagcatgtctcaacgcctaaattcagtcgataatggggtcccctttgatggtaccccgaccgcggattccaatatcaaccttgatgcctcgatcaattagtggaataacgtccctcccacctctagtgctatgctagctatgctaggcaagttcccgtggtacacacgaatcgagctgcgaggatccaaaaacttcttatccaaaatccgacgatcctttaccccccttcccgataagcgaaaatttggcctgggtgtctattgcggcgcaggcgtcggtcgcgtgacgaaaggcttcctcggcgatgtctgtgaaatggtggatatcgtcgagcccgtagaaagttcacacagggtctcaaggaaggagagttgggacagcggggtgtgattggagacgtataaaacgtcggtcttcaggattggaatccgcataagaaatacgatttgatttggacccagtggtgtgtgggacatcttacagatgcacagctggtcgcctacgtcccaatatgtcgtgaatttttgactggctctggaataatggttgtgaaggaaaccatctccactgatccactcggaaatgacatgtatgacgaggtagacagcagtcacaaggatggattcgaagttcaaaattatcttcattgccgctggtatgaaaggggtcaagtctgagatgcaaagtgagtttccgaagcaatatgaactcttgccggtccaaatgtatgccttgcggccgaagaaatgaactggatctcgagaatctacgtcacggcttcaggccgcgactcttaagcactctacttagaaacggacatttctttcgcaatgattaaaacatcccgcggtggtcgcatcggagacataatgcccttcggatcaacaaatctgcaaacaatgcctctggcccacgccgaaacagctggtctcgtctcaagcagcatgtcgcgcagtttgttccagatgctttcgcggctccattccacattaacaactgcgctccacgatcaaactgctggcgaaatgaccagacaaagaaagtacccttggccgtcgagcgtcatcgaacattaaggtcccgacctttgttcctcgatcgggctgctctgtaaagggaccatcaggaagagacgaatgcctctcgacaccgatatcacgaaacgagtgcactcatcgtgttcaaaggcagatgacggtctttatatgtttggaaattgacaatgaatttgctggcctttgtggggtaattgagacacgagtggggttgtcatgttggctttattaaatcatccaaccataatgggtggctttgacacgcatgggaatatgtggtaattctttgcttgtgattctcaaaattccaacaatgtttcgacgatcgtcgtagttgcgattcagacaattccacgtgggaaaccttacaaaagctcacgatgatgttcttgattctacactgtagtattgctgtaaatgcttcggcgttcaagcgtttcttacaaggatggtgcattcccaggacgaaagaaccaagatgagccggcctttacgatgattgggtatcctataaataactactgcatgctgaagcggtctgtcattaccactacgacgtatgcctggtgagtatgcagatccaccgtaactttaccataagtgatgattttgtgccctggaaagacaaaagaaatgcaagtgacatcaagatcaaagccgaggctgtcaaatgatcgctcgataaatagagtagaacgtgacagcattcaccggtggctatgacgtggtcgaatcggacttcagtatgaaaaccacttgttgtatgccaagggacgcgtcaactattcggcatacaaatccattcgatgctctgagccacccacgcgcaatgctgtaagctagacgtgaacgaaagccaatggtttgcgaggcgtggttaaaccagattaggtacctgtgtggctacccaatctagacagataagcaagtttgattgggagtgacaggatgagcttctcaccgtcactttgtgtttccttcgcctaaagattgcccctggactcgcgaaggactgacaggggagggtgtctctcgcctgacatgagccctatattcctgatgtcggatcataaagttgcacttctcgcctccccatttagccctcatttgagaaaaacttggccatggactcatggtcactgggtggctctgagcctggagcctatgtgagtcatcttcagaatacatctattgacctccctcccgagccgggagatgcgcccgcgagatatccgccgacccgtgaaatttctgcgatatccgaggcctccagctcatacatcactggtgaagatcaacagctagaaccatctaccgcagagtctgcatatctcgagacatccggaatttcgtcttctgctcttgaggaagttatcgttgcaaatgagtctctatagagtactatttgcgacgagttcttgatcggcgaaggcgggatgaatggtggtgactctagcacgaatctggctagtaattctggcgcagtgaacaataccaacaatgatgagcccgcgactcatgatgcggagacgaagggcggctgggaatctgaagaagcagagatgccttcagaggaagtcatcgctccttcgccacatgatggtctgtactactgccaatatgtgatatgtcaacaacggaagggctatgccctcaaatgtcaactgacgtaggtttcacgtctgatttcagttttcagcatcgcccagctgctaatgaatctcaggaaacacattcggacgcatgttctacctgtcaaatgttccgaatgcccatacgcagcagctgaaaagaaagacgttgatcgacatgttaaagctgctcacagaagactggctgagcaaacttgggggcccatggagccaattctatgcgccttgtgcaagaaggaattcacacggagagacaacgcccagaaacactacaaaacaaaacatgttcgataaatgaagcaggaaggatttattgacaggatccagagtaatgtattcatttttgtttttgcacaatggcatgctttatttcgagtccctgctttaggaagactcgcagttaccaactttgatctatcccatgggggaggaggattcgggttggaatccattggggttttgccgttacgtatgggtgaaaagaagtgtccacccccgaacccattgtatctgacatgccgggtgtatttagcatttgatgtcagacgatattttgacattcaaaaaaccgtgcttccagtggtaagttctgtatagcttcgatttaaagtcaatttgacaagtattggtagagttttgtgcggtttaaagtcgcgaattgcttcggcttgggcccaggtagatatgcgaccgctggcaaccacccacaacatcaacattggtgttgagaaattgaccagtcaaacttcaaattgaggatacggactgatgtgagactcacgggaaattggaagtcctagctattgctcaattcaattttggaaaatttagaccgttttacacacccggattgatatgttttatggcatctgtcacacacattaatgcccatatgtacagaaaacatggaacaaaactttcaccaagcccgcagagcacgcccattcttattcgcaaaagttgtcagattggcgtcagccccagtgaaatcagccgacatgcatgaagcataccttaaagctccaataggcgatagcagacaatacaacataccatttgacggagggacggagtgcaacagtgtgaaagttgggaagtctcagaaaggttggttaaaatcacccctggattatcttccacaacgatgacatttaatgttatagggatacgggtctagtgacgtaggtgtaaatgcaaatgtacgcaagggccagtaaccaactgcacatgagccaattggtaagggaaggcaatttggacaaatggatagtcttgttgagctgctaatagctggaaaagcagtttcaaagtgagcgtgatagtgatatgcagaggcacagaaatggggaccatgtggtccatcgaagagactgtgcgtgcagccagagtcatcattccgaaaatagcacggactgagtgtcatgacttggtccaccactacgtataagccttccgagcagcatttgatagcctggggcaaattatcttttcaagcactcggggtgctttgctgacagcacagccttgtttttattcaacagaaccattcgatgcaaaccaacaaagcattcagccaacgggaaatatggccgcaactaggaggtctccgagacaatggcctcagcaccgcattcagcatcaaacatactggatgatgcttctgtataaccgcaagaatgactttcgtactgcctctctatggtgcagggttatccaaatggtgatcggcgtgagagatcgttcgccgaaaagattataatcactttttgtctagttcgtgtaaaatggattggctggcgtgccaaagatagtaggagcatatgcttggtgtacatctggggatgcacgaagaaggtatgttgtatctcaatcgtatctatgtgaattgatattagtaactgccctagtcgactccgtagcgataggtcactgtggtgattttatgatccttgaggccaggcggaaaaccaatgaatgccccaaatttggtcccaatcataccaaggctgtgcgacctggaaagcaacgtcaagttgcacctagcctttgcaaactagttgtcgtgggtcgacattatggcagctcctccagaactcgatcttagtcccaggggacttggaattggcgtgggggatccagcatctcaagccaccgtcgtaacataaaatgactcatgacaaagattctatccaggcttaatgaaagaagtgggaatgaactagtagtggtcttgtccaacaagaatgatcaatgaagagcaaacgatggtccgccaaatttgcaatccatgatccgaaacttgagcaacgttgcttccggtttctcctgcatcgtgggcctcctgcatcgtgggcctcctgcatcgtgggcctcctgcatcgtgggcctcctgcaccttgaaccaccttagttatctctgcattaagaccaatcgggatcaatctccaccagcaatttatgagttatccacccacgcgtgctgagggtgtttagaaagatggaccgatggggacctagccgacagctcatcacttaagcttatatagagctgctttacttagcggcggctggcgcgctgacaatgccccaagtgggagcgataaagtttacgataaaaagaaaaaaaaaagcaaactttgaaccgtattttttgagatacatcacctctatttaatccctatctccattgctccatgcatgggtcgtagtccatgtaattaaacgtgttgggttgaacctagagtatgaaggcaggctacgggtttacaggacctacaagattgtgattggtagctgccaatattggaggggtcgagtgaggtaaaagtcctttgtgaaactaatgagactacctgtcatgtagtggtgatttgctagctctgcgtgcgagcagattcgcaaaattggcctgctatagtcctggcaaatcgcattccgccatggcagcttaccattggtgatgggagtgtgtgggcagcggtcaaaaattcccctcatctgcttcatatgtctattcctgcgctcattcgtgtatttgttgattcttgctgcagatagcctgaaatagaatgatacaaacctctaaagcagataggtctgcatgagaactgtgtccgtgctttgtcttgagaccagggaggcacctcttgactctgaagtgcttccacaccttttgtttctatatatctctggcttcgatcttgaaaccttctattttgatcctagtgtcatccgaaccttatcttttgtcatgtctgtaaacattcgatcggagcgactggccaagtattttggagcggttattcacggaaagcaagaaatccaggattcgacccatttcaagcgatttattgaagcaacccttgatcagagtgatcctagcattgttgttcagcgaatcatctcaagccaaagcgctctgaaagccttgcaaattggactgaggtccaatctcaccccggtcttcatcaacgggtataccgcgaagttgattcaatacttgaagaatcgcgaagtcaagctactttgtaacggccaatttctcgagcagctccttctgctcatcgtggagcctcggactctctggggcgcatttttggaggctttccgcactcggaaactggaagatcatgcgatccaggctctgtgctggttgatggcagagttgctttcattgcctccgtcttgcggggtggatgttagcgccgacgctcagactgttttgaacgatggatcgcttttctcttcgccctcggttgacatacgaaactcgggccacaaaatcaaataccgcctagagatgaaaacatctgcagccacctatcagcactctgagatcactgcaggtggtcggcatgacaatgattttggcgactttcgcttgacggccatctttcctacggccgatgagatggaatgtaaggagaaaccgttttatcgccgtgcggaagacatcgcgcagatgttcagtggccaacgcattgccggctatattgacaaccaatttcgtcttttacgagaagacatgctctcagagctgcgtgatgagtttcaagttgcgagaggcacgaagaagggccgacgatcggctttccatttgaggaacctctttctcacccatattcgctgcacttctggtaccccaagccgccttcgaccatacactattggtgttaccgcccagtctggtcttggaaagctgcagaatctctcagaagatcgtcgtaaggagttcttaaagaccacgcctcagtttatcaagcatcgtgcctttggttgcttagttagagatacagaaattgtggcttttgctacaatcgacagagatatcgatgaactggtatctgaccctccaacggtaatgctgcggattacaggtgaggaaccactcaaaaagtctctgctttacctaaaactctaccatgacgtggaattcttgcttgttgacacagcaatttttgcatacgagccaattttgaggtgcttgtaggcgagaatagaactgcctctcagagaagagttgtttctctacgaaagagatcagccagtgaagaatccaagtctagttccttagggtgtagtcaacaagctgaagaagggatacggatataatattcagcgcacccttcagacctcaataccagtgatactggactcttcacagctgcactccttgttggccggattgacacagagagttagtcttattcaagggcccctaggtaagatcatacggatcctcttatttccactacctcagatacttaacagacaatatgacctccaggtaccggtaagtcattcataggggcccttctagcaaaggccgtttgtgacaacaccgaagacagaatcctggttatgtgctacacgaatcatgccttggatcagttcctagaagacttactagatattggtatagatccttccgccattgtgagactaggatctaagtcgacgcgacgcactgagccgcttggattgttcaagcaacattcgtcctataggaggaattacaccacttagaacaccatcaatgcactcgagggggatggaaatgagcaaaaagacactttgaatgattccttccaagcttataggaatctcacagctaatactacatctatcttgggctatctggagtttgaagaaccagggttctttgcggctctgaccgtaccagaggacaaaaacggcatgactatggtcaccaaaagtagaaaaccaataagaaaagactacctctatgaaaggtggattaataacaaaagcctaggagtatattctgatcttcttcccgctcattcccatgaggtctggaaactggatcagaaagtacgggaggagaaagacatgtcatagagaagagccctattgagtaagtaggcagagactttggcagtcagaatagcattgttcgacaaatgccaaagccgacttggtgctaccttaggcaagaaaaacagagaaatcttgaaattaaagtggtttattggttgcaccactacagccacggcaatttattctaaggacattcggcatacttctcctagcatcgtgcttctcgaagaagccggtgagattctcgaagcccatatgctcaccgcaatgacaccagagactaagcatttaattctaattggagatcatcaacagctccgaccaaagatcaataactatagcttaagcacagagaaaggggatggttataacctgaacgcctcactcttcgaaagacttatataagccaggtttccatatacagctctaagcaagtagtataggatgtgtcccgagatctcaagtcttatacgcaatctcacttaccctagactagaggacaatcagaagacgaataaccacccctagctacaagggctacacgacagagtgatctttttctaccatcaaaattccgaggacatttctactaaggtctcggaccaacatgataagagctcgagagggagtaagacaaatgtgtttgagacagagatagtcttcaaaatcgtgaagtacctcagatagcagggatatagaacaaataagttagtcgttttgacgccatacttaggttagctgagtctactgaagcagactctaagcaaacagaacgatccagttcttaataacctggattcttacgacctcgtcaaagcaggccttctgtcctaggcaggtacttcccactctaagcgctaaatcaggctgtctacaattggtgagtagggagaaaagggaatagttataagaaagagattaacctaagaaaatagacaatttctaaggagaagagagtgagattgttatagcttcactcactcgcagtaataagactggagatataggatttatggcagctcctgaacgcctcaatgtccttctctcacaggcccgaaatgtcctcattctagtgggaaactcagagacgttcgtctctagccgaaagggtcgaaagtactggaggccatttattaatcaaatgaagtcagagggccacctgtataatagactacccgttcaatgtgagcagcatcctcagacaaatactattcttcgaacagcggaggatttcgatagagaatgtccggatagaggatgtcctgctccttagtaaattcacaaggaattttacccttactaatatcctaatactaactctttcttaatagcggtatgaaattaagctgtggagtatatgagtgcccatcaaaatgccaccaactggcggaccattcaaatatgaagtgtatcaagattgtggaatggaaatgtcctcgaggatattgtctatctctttcatgttcttaggcaaagcgctcatgtcgtttctatatccaagaagatgaggtcaaagagcgtaagcgcaaacgcgatcttgagttagagagagaacgacaaaggaagcagaacgagtacactcaacaacttacagaagcctaggaggaagttttctatcttaggcatgtgcggcgcgctgaattcgatgatatggaacgcgcgagggtgcttgaatagtaccgataggaaattgtggggttaaagaatcaccgcctaccagtatctcttcaacgtaaattgaatcttatagcgactaggagtatatctctaaccatcacagaagcaaacacagaataaagcgtatattccgttaagaaaacaatttaaagccgtagtattgagtctacaagtcgacaggtaataccgctgtaaaataactcgtcggctaaaagcgaataggaatatgaaaaatagttctccaacgctcaaagccaggcgatcgacaatttgatagacataatcggactcgaaacagtgaaagcaaagttcttgtctatcaaatggaaagtggacgctgctatcaggcagaatattgatttgagccatgatcgatatggatcagtattgcttagaaatccaggaagcggtaagacaaccattgcccgtctctatacaaagtttctatcctccatagggatcatccccagtgacacattcatcgagatgaccgggtccagactcacgaacaacggtatttctggatgtcaaaaaaccatcgaaaccctcttaaaaagtagcggtggtgccatattcatcgataaagcgtatcaactcctcagtagcagtctcagtggttcgcaagttctagatttcctcttagctgaagttaaaaaccttattagaaaagtggtttttattcttacaggttatcaacgaccgatagagaagttcttcgcgcataatccagggcttcccagtcgtttcccgcataagctttagtttaaagacttcgatgacactgagttaaggcagatcttggtcagatacatcgagaagagatacaggaagcagataaaggtcgacaataaccttagaggactttactatcgcattatagctcgtcgagttgggagaagacatggctgtaagggcttttccaatacaagagctattaaaaataccttgaccattatcactaagcgacaagctgcacagctcagtcgagaaagacgataaggtgacagcaaggctaaggacttctttctaagcaaggaagatctgattggccctaatccatcgcaggctctgaaattatccaatacttagcagaagctgtagaatatgattaggttagacgctataaagaacacagtagaggccattttagataccatacaatacaactactagcataagctagataagaaaccactgattaagtacagtctcaataaaatctttttaggaaaccccggaacggggaaaacctcgatcgcaaagatctacagtcagatacttatagatatcggattattatctaatagcgaaggtatgctatctcccatgctctctataagttatactaacaatcacagtcattataaaaaacccctcagattttgttagcagcgttatcagagtccgaacagaataccaaagggatactcacatctacaatagggaaagttctagtcatcgacgaggcctatagactctttactagaggtatctcggatagggcaggttcccagagtaactcatacaggactgccgtaatagacaccctagtagcagaagtacaaagtacacctagcaatgataggtatatcttgctcctaggttacaaagaactcatagaagagatatttcaaagggtcaaccccagcctcagtcgacgctttccaatagaccaggcatttgtctttaatgacttcacctcaagtgaattggatgctatactaatactaaagcttaaagaacaaggatttgacataaccgatcgtagccgctacatggtattagagatacttaagcgttctcagagttgcccgcgttttagcaatacaggcgaaattgataatctactcaacactgccaagatacagtgctaaaagcgcatctcatctagcaaaggcaccggctctgctccagattctatccttaatgctcctaactttaacgaagactttgatcgcgcagatagaaaggaaagtgttataaagatatttaaaggcgtcatagggtgtgaaagtatcgttaccaaattagaaggctatcagaaaatggttcagagcctcagacgactaggcttagaccctcgcacacagttgccatttaattttattttccgcggtcctctaggtagacaaacctctatttacagtcttttctccactaaatattactgacatataatccccctttaggtactagaaagacaagcacagccagaaagataggccaagtctactatgacataggcttattagcctcgagcgaagtggtcgaaacctcagcgacagacttagtcggtcaatatgtaggtcagacaggcccgaagacccagcaggttttagaacgtggccttagcaaagtattattcatcgacgaagtctatcggctcgctaagggacattttgccaaagaggccatagataagattatcaatagtattaccaagccccggtttactcaaaggttgattatcgctctagccagctataatgccgatatcaatcgtcttatatcaataaatccggggctcaccagtcgtttcccagagtctcttcaatttgatccattgtcctcggcagactatgtcaagttagtttgcgagctcttgttaaaagaaaaaggaaaaatattagtcaaatcacaagcccagttcgacctggtctgcttaaagagtccaaatattaactttatgaaggaaatgttacagcgctttgatagactttcaaagactgcaagttgggcaaatacacgagacattggaactctcacaaagacaatctttggcaaattgctacagtcattccacggaaagaaactagtgctaagtgaagacatggtacttcaagcgttcgactcaatgatccttgagcgatctagccgagaagtctacccgcaaaagactccatcaactacaatccaaacgagcgataaaatagacctggctctacgcactcagtcgttgagcaaccttgctaccacactgaaaagtcaaggctcagtcaacaaggatgtggcttctagcaagaaactcgacactatgggtcccgaaacagacagattcactaccaccacaacgcgagatgttggtgttacggacgatgagtggtgtcaactcgaaaatgacaaacttctggccaacgctaaagagaaagagtactcatgcttgaatgacgaagaagaacaacagaagaagaagatattaaaattaaaggaagagggggaaaaagcggcacgggagctggaagatgcaagagggaaagcagacgaagatgccaaaagacgccacgagcaagaccgactgcagcatgagttagagcgcaggagacaggaaagattcatggagaaactccacaggcagcaagaggctttggctgaggcccgtcgtaaggaacaagctaatcagacgaaattgaaaacaatgggagtctgtgtcatggaatatcgatggattaaacaaaacggaggatatcggtgtgctggtggttcccattggggtcggatgcgcagcttggaggttcctgatcttgtgatattgaagcacgagaaaattatctatttttagtagtcctttggaatttcgttgaaatccgacaaaaatatgatgattaggggcatccattggaaagcaatccaaccgatagcatggctataagctttagagctttgaagcgcacgatatcggcgctgtttttccatatcgacactcggcaacgtcaacttcgaagtctgccgtcattatcgtcggcgatatatcgtcaccggtaattggacaataagagaaaggctcctgacgtaaaggaatttttcacgaagagaatgtaagctgacttactcttttgttcggatcatgcgcttccgttgtgtagtcttgcgtcgtgttgttgccgtaaaatgcgacctggtatttagatatcttctgttgctctccagtcatatcaattagctctcctattgcaaagtacatgtccaattctttctatgtcgcttccaattccctacgcacaagtgtacatatgtatctacatgtaagtatctatactaatgcatattcacatcattgttttcgttcctgccaacatgctttgatattaccaggtctattttacggctacgctttccttcttccgttatgctatatggcagaatatccaaaggtcacatgggttcgatttcattctatggttttactctagtagattcgaggtgttcgagaaaatgggacgcgtgccacgacctcttatttgttgactctaaagctcttccagaaattaaccaagtcgacatatgattcttcaactcagtttccactgaactactggatccacgtcgacagtgagctgtggatagcgagatatatgttcattgactccgcaccagtcgcccagtgtacccattccaaaatgtgtacccagtggaaacgccttattttcccctctagaagagttaaaaatacaattcatacctctgagctacaacagtccgcagtgctggtctcaaaaagggtttggcagtcgtgagggtctgagagtcttaggattcactacagttccttgggagctctctcaagactccatcatccatgatgccgtacttctcgaaggacactctcagcctcgtgactcggacaggtgggtgctattgctggctcgtcgaatctcagaagtagtaaagagtcctcaattcctgttgtgcttgaattggatgagctagaaagaaactccttttgtcgactttcaagaatcaggaactatcaaaggacttcctggacttcagggattttggcatggcaattcctccaaagtaatgttgcctttgctggcagcatataccctgtgctggtaagatgtagtcggcaagtaattgacgagagtaatgatatcgtctctccagacacgagagacttttgcttttgttcaagcccagaatctttagcaaggctatgcggggagacatttcggcggcatgtaatgaatggatttcgttccgcgtggaaatattgcgagcgatcttcgatatctcaataacccacactggcggcctctgaggttagcgtatctctaaaaaagcggcagcgaagtgataaggaaaagaatacgcaaatcaggtcgccactggttgttgcacacagcccctccttgaattcctgggaaaccacgcaagcccggtgttccgtcttgcccaatgttcccagtgcttccgatcggctcttggtcgcccggagaccccttaggccctggaggacctggaattcctctgggtccatcactaccaggcaatccctctccctttcgaggtccccgcaagcgttgtctgcaatatagacaccatccgagagcgtttgccactgcaatcgcaacaccgaccaaagcgcctattgaggcagtatggctttgttgatcaggtctttctggttgctcagaatcagggcttatagtacttggttagtaaagtgtctccttataagaaggaacagagccaagggtcattgtcgtcatgtggtgcgatccctagggatgggtagagtaacgatcttgaaaagcggtaatcttcatgctatagtttgattatccaaaacgcgatggcttctcaccaggaaggggggggggggttcgattgagaaggcttcgcctacgaaatacgctcatgatggtggccggggtggtatctgagaagccttacgtgggcagtgtatgaaaggatatgaacaataggtaggtatgggccctcccaaggctctgcttcgaccgtaagaaaagggagtaggactccagctaaattgatgttttttcatatgtaaaaaaagaacgcagaaaatcacaaacgttcgaagtggccaggcccagaaagatgagtggatatacacattcgacaaccaggtcatccaattattcaatcatggagcatttgtagaatacgtcagaaaactcttccttcaacttcgcaagcttcgctggtgcagtcagctgggactctatttcctcccatttccgcttccattcttgttgtctctcgacagaagaggttggccgttggccaaaacagtcgccttctttctgcttggctccgggcgtagagatgtccaacgattcacattcgttgtgctccacagcgaacatgctgcgagcatacttgagactccatttgggttgtttcccaagattgaccaacacgttgtagtgaatcccttcggtttcgtggtgctcgcggcatccgtaatacgtcgccatcgtaagtttgttgcgctgtagcatatagctaaagccttcttctaattcatctttcaattcaagagagcattgtgaataggtcagaaatacccatcgatggtgcaatcgtgcttcagtgtttactggattttcgagggaaatctcccctttcgggaggaagacttggataccctggagagattctccggctgaccgctcttagagaccgctttaaatctcccgaacattttgatttccaaattgctcatacttcgatatggaggggtaaaccttccttttatcttattgataacgtcgcgtggcgtcgaggcacgtagtgccaagaattacccgaaagggtaatttattaagtcgcacagggtccccgagggtcacagttccatgccaagaatcgcctgtttagggagcggtcagaccacgaccggggccttcgggctcacttacagtacgctgtcccgaccaatggtcggaggctcttatgcggtatccgtggatccttcctgtaaaaagattacctccgaaggggaaattacgttgagtttcaagtctcaatttttggggcggcagtgttataatggagagtggagacactttatcccaaaaagttgtccaatcaagtctgaagattgtggaggtacggagtatacagtagctgcgacgccttcatggcctatccccagcaacagcgcggcagttattcacatcgacggtgtccccggtggtggactatgcctccaattcctggatgcacacttcaagaataaaaacatcgggccgatcagcagagtgcagagggtgggaacgcaagcgattattgggacattatccacagttgcgaccagtgtagcggaggcggaggcttacctcgccacggtgtaacattggctctggagacgagctatgaagatgtgtacagacatgcacaccctaccggtaaccaatctcctccacaggagtacagctcagatcagggaattcaggagataccatcgttcaccattcaccgttcaccattcaccgttcaccgttcaccgttcgtcattgtaccaggtcgcaaaagcgctgaaaagtatcgacatggaaacactggcagccatccatccattcaaattggcactatgggtgaagcgagttcagagcgatagtcaagatgtaccggagacacagaccgaagcgggcggagttatgcgaatcttggtcaacagatcagcgggggaatgagatggtaggatttggcgtggcgagtgaacttaaatgacatctgagatgacgtacaccaaagacaatcctaaatgggctgcaaggaggcatatcattagctaaggcgtgtatatgtagatctgtgatagttgccctttgggttcagctgccgggcgttattagattgtgtgtgtatctacaaaattatgttcccgcttgactaagaggatattggatacgaccatttgatctgatatcacagcagtgatttgtccaatttgatgacaagatggttatgattccgcacaaaatagcaatatacttttaatgagttaccaatgccagcacctgaaaatttgccattttatatcaccttccaaatggtcacatttcaatcaactgtgacaaacacttcggattatcgaacggaccagaaatattcccactgcagtacgcaaagccacgagttggtgttgaaagcgtcacgcagatccggtctggcttggtgctttagctgctattcttgcgaagctatgacgagaatgcgagaactaatagtggccgataagaccaagcactgagagactataagataaaggcaattatctacgggcaatgcatggaataatgaattcataacatgtcggtacttgttagagaactcaaatgattatgatcccatcggccgttgtttccattctccatcataactcggtccacatgaaacaatccttgccatgaatcacaggatagagaatttctttatattgtaccatacatgtcataatgctatgtagcatgtcaaacacaaccctatgaatgtgttctcactactaagtgtaagctatacgagctccgaactactaacaatggcttcggtatttcatttgcaacaattacgttcctacaagcctgctttcgagatgatgtgtaatgaccccccgagatgccagtgagcgatttctttctcaacgtatctgttgcggaggcgtttatttgtctaacataattttcaaagtgcgcatatctccgttcatacaagccaatctaatgcatgacatatattcatgatcactttctggcagtagtaagtactgctgcaaaacgatatttagaatcttccgaccgtcatctcttgttggattgacggaagccaatgcttggctcatgccttgtatgacttggttggcatctgggcaatccatgcggagcgcttcgaatttctcgcacatgtgactccttgaaaaactatacatgctctctacagctaagcgtaggatggattggttttcgatgtctcggatgctccactggaaatcaggaacaagaccagcgagcagttccaccaagcagtagtgttgcccctttatggcttttgacagggctgtctcgccaaaattatccaacagactgacatcagctccatatttgatcaaaagtttggctgtatcggtattcttggataagacagctgacatcaaaggggtatttccgcggttgtcaaagctattcaggagcacttgcccatgttcgggaatttgtagaacataaccaagaagatcgtcatatgcatttgaggctgcatagtgcatggctgatgatcctttcgtattagagcccatcaaactaattatccaattagagttctgagaaagaatgtagcaagcatcatgttgtctcttttcatttaaagcggtttcgaacgctgctgtcagttgttccgaaaactctagacccgggacagtacaattcagaagaaaattcatctttatagcaatcccttacaactttagttgttgagtgttctatctgcaactgggggagatagtcgactttaatagggagcaagtctactttcgctcagcaaaacgcctcttttggctaaatatgtagctttagaggatgaatgagccatttcaggaacagccgtaaatagaacgatgtgaatttgggtaaacgtctgagactcagacacgtattgaacactattttcccataagggtaaacggtgagctgctccagagtgaaaagtcgcttcggagagttgacaactcggtaaagagccaatttactgcatgaggatttgtgatgactcaaaaatagctcaccttcgcgtcaagccctaaatcacctgggcacagtatatcatcagtctgaaaattttgtaatcaacgcttgagagtagccattctgaataggcattctcattatagcttacttctgagctctatgaaacctactcatgcattttggagagataagaaacaatatcaatatccatgtgtatatacagtacacacgatgcttttgtaaagctgccctgttgactaggcgtccctgaagtgtagttcgttccgaacagggtaatatgaaatgagacaagctaagcacctaccgaatagctagtgcctaaagaacccagaaattggattcaatgacaaatatcagcttcgaaattggtaatcatgcgatcgggatgaaggtctctgagatgaacacagagaaactggagttgaagctgctgtcgaatatgacttcactgtatgtatgtcagtaaaatggtgacaactttgtacgtatagattctaacttgtagttgatgtaaaggcgaaggtagctactcaagttttccacaaaaaacacacaatttaattgttcgcagatctcatttaccagctgctttgcccgaatcagtacttattagctggggtatggccatgcacaacctgctgtcgtcaccgctgtgaaaccagctgtatacaggtcctgttactatctactctggttgtcttcaaacaaaatttcgcaccattttactacatcattagttgcaattaagacactgaggcttatttcgccaaatccttggtcaaacagtcaaagcaggactgcagaaaaaatagcttaatcacatgatgtatagagatcaagaatagatcaagaatagatcagaaaacttttctgtcctatttccgttatttcatacttacttcatcaatcccattacttggatggactaggcatagatgtattttacgtaaaagcaattgaatattgctatttttggataggatcaacgtaaataatgcgtattttaattttaatgttcctagcggccaacgcctcggtgactcaatcaacgcgatatgcgtcattaaagcgagcttcttcaaccacccactctatccgtactcaatcctctggtaatttgaatgatgaaggggagagaagtcggatatatttagccaacatcaaaggaaacaggaagtgtgagatctcattatagtagggcgtcgccctgatgtaccaaaacaccgtacgccctcgcctgttaaaggatgcgagaagtctttcgccaatcgctataattagcctcgagtggaaatcgtaaattttcgagcggtgtagcatgatgcctttattttacacaggagagtggacccaaagtttattgagtagcctgattctgatcaagaggtgagtgggcttgccacaacctccctggagagcctgtgcccctcgcaagctagctcatatgagattgcgaaacaagtagattgtgaaggcgttttagctgctaatgtacaaaagttggaggttccaagccgctcgcggatggtttgacgatgtataacgtgcgctagtttgaaaccacatccaccgcgatgaaaacaatcttttattgggcctgatcgtttagtagttgtattgcggtcacctcatcccatccgagatcagtatcaagtctttcatttggtttaaatttgtattccgccgtatggtttggatttctctatttctcgaagccaggtttaaatacaaatttggcacgcactgaacagaatgtgtcaggcatacagaatggttaccgttttcttacagctactttttatgcggtggctcattgggttgctgtggataagtcctgtaactttgtagcttgatgattatttagaattcaagttgtttacatcaacacgttgccctaaatgtacagtagcgaccgctttcgccttccatgtcgaacaacactgaaaagcttttccaaactctaaaaacatgctgcgctaacccgtatatagttatttccgtatttgagaatccgtcacaagggccggatggtataatactagacgcaaagaaacggcttagtaaggtatctgtattgtattgttacggttcatctccagaccgaccctctcttcccctcttctgactaccaacggcagacctcagggaacttcactgaaggctcaaattagaaagaagctggaaaacagcatgcaagtccctacggagatatacgatcatgtaaggcctaggattgtgtcagttgatcttttcttttgctcggtgcttaacattccttacagattgtttatcgtgtttggaacgtatacaatgagttcttatatttggcagacgatgctaggaaatacgcgacctttgaaggcagggctcgacgggacttggcaaacctgcgccttgtcaacagggccttctgccgcagcgcgtcaccttggctgttccggcatgtcaacgcagagtgtacttccacgctggtgactccacctctagagcggcttatacaattatcgaaaagcccttatgctacatgtgtttgtcaaattgacttcggctttaaggaaagccttccatcggataccagcacattatatatcgaggccctcgcagaatggcactccttccttctggtcaaattcaccaatctcagggcccttggatttcatgaaccgcccttatcgttaccgcaagcccagaaagcagtgtatatggagatagctatctctatattgcgttacgtgccgcttccaaacctgtcagaacttgaagtcagattttctattacccacgactttggacgtttctttccgaatgaaatcaattctttacaaatccctatcgaagacattttgcaacatcttcgacacctagaactatgcgtttgtgcatacacggattcggcggatcagaggcgcagacagacgccagttttgccggaatatgctgctcttcccaatggcacctatgccccccacttattcagaatggttgaaaatgcgccaaaactcaaatcactgatattgtctagtgtcaatattttagatttcgactctgtcacctttccatctaccgtttgtctagagtctcttcatctaggaggggtttccatctcatctgacgttctcctttcgcttatcaaccaatctgcgcataaaatgaagtacatcggtttctggctggtgaaattaaagtctgggacatggcagcaggtgctattgcaactgtgcaagttaccacgccttctcgatatcaacatcgattatggtggatacacattaacaggatcgagctctcatctggccgacaggctatttccaagtccggagtgccgtccagatattgaaacgatgcataatcttgatttgattgaacttggcaatctacagtggcaagtcaattcgaacaggatcgctatgggattacaacctttccccgatacagactatcaacatatcaataagccatcactggagtttgaagggtgatttcttgtaaccaccaagaagcttaaacagacagtgtgattttagtcaggttgaaatccagggaattgattttcaattttcaatagcgatagttcagccttctatgcttccaagagaacgcgttcgtgggagtggatatggtaggcgtacgacaaaagtaaccgggggtgggaacatattgtgaatgttcgtccttgttggccgtttgtggagatcttcaagtcttgcaaggcagatacaatcagacatgaaatggaaaagcaatgtactgccttttgttgaataataatggatcgtcagggaagggaaaagaagaaggagggtagagagagagaaactatctactgatgaattagatctgtcccatatgactgccttaggcatcgggaacccgacatcaagtgaagagatgcctaagcagatggaaatggaagaggttagccagtaacctctagtgtccaatgagttccaaagccatggcatgattgatctgcagtggtggaggttgtgaataagccttactgtcgaaccttgcctactacactgactcggaactgactgctacaaagtaccggctgtttgcagtgatgcaacccgcaagattaaaaatggaactgttgacatattacctatctaaagacttatgcttgccgattttgtatcgaaccttccagcaagcccaaacgtctagtcctagatctttgtattttccatactggtattttaagctcgtggtatttattacctggttaggtacacatcgaattatttgcgcactattcatccatggattagcacatcatgtgattatggtttgatagaggatccctgtgttcccaacatggaaggcgataccggtcgctactgtaaaaccgtttcagaatatagaagatggccttgctatcctgcagacccgatcaaaacgagagaatattctatcaagtatgatctaaccaaacacagagatctaaaatccactgaccattactgttagatccgaatgcaaagcccctcgcagagcgacttacaggtcttcctcttgctttggctaccgccgggacatatcttcaacatagtacgattgactgcgaacgctacctcaaggagtatgagaaacgttggaacatcagccgtcgccgaccattacagctccaggagtatcaggagcgtacactctacacaacctgggatctgtcatactctcgcctagaaaaggaagatccagacgcagcggaattgctgaaattacttgccaatttcgacaaccagaaactttggtttgaactttttcatgccggacttaccgatagctctcccgaatggcttcatgaagtgatcgcctatgacgtaaattttaacgacgtgatggcagtcttggttagatactaattacgttatagtggaccttctgttggatgcccggatgcctaaggcatcacatgtaaatagaacccagatagtttgcctgctctctcgtcctctctttctcctcttcgtccaccagaatacatacagtgctttctctatgaacttacacgtattgtatcaggttatgagcctcttttgctagttggaccactagcaactcttttctctgaagctattttcatctggagacttttgacgatctgaccccacagtggatccacctttgtacgtagtatactacacagattcggatccagccaataacatccaggaaatccttcgagccctaccggtaaaagctccgtttagtcatctttttacatcatctcaaactgtctcgtccaatggagacagcagtcctgggggagatagcaacatccgtggaggctactgtatacttggacaatgttatgcataattctatcctataacgatatacgaggatggtaccagagcaatccttgcatccctcatggttatcaccctatgcaaaactctacccatgcaggattcgctagttggctatatctgcatgatgaattttcagtatatattcgcatttttaccagaatttctgtctctggtggcgaaaagtatgacctaccaatactttcaagcatgatttcccaacgctacgactaccgactgtgttttattttcattcttccttagtacggcgataatagatttgagtatgtcggatatacacctcaccgtagttaaatctttcggccgatgtctcaggtttttggaaagccttgatttcgtggaatcatttttctaaccctgcgagacttcgtttctgggattttcaaaatttgctactgtgaacctgtcttacttttctacaaaggaactctactacataaattgatcaatttctagaaaatactgacagcgtacgtaaaatctgattatcattcaagaatattgtgagtgatacgacccagtatttctccagaccatcttagttcagatccatctttgagtttattgcattgggactttgactgtctttggagatctacaaaatgccgtgatacttcgtcacctacaaggtgaacaacatagttcgaatcttgtacaggagctttgtcacaatgcgaataacacatcaggggtagggcgatgccgccagtgtcatgagataccaaagagcccgggtcgtctttacttgaactgcagggttctagtatcaatcaagtaccaaaatgacgatcggagaagttgtgagatggaacagttgggatccacagataaatcccagcagagcaaagatgacacagttcaaattgagcttgttttggacacttttcagaattgaagtgaagagaaaacccgcgcccctcaacacctgctcagtccgacgtttggcacctttttggccaatactgtctgtattggaagggaatgcttgctcttctatcgcattagtcgatggtaaaactgcatcgtggtcttcggttgtcatactaccatgcgctttctgtgggtctgccttgtggtttgcttcccgtacggtgtcctcagctgggggacttttcgaagtgcgacttggcatatcattcgcatgaagccgatactctccatacttggcagatccttgcggggattgatttggcaggccaacttggcacaaccgactgggcataggctcgcacaagtgcctggcactgagcctagcatcaaaaatacggttgtgcgacggtaatcccagtgacggcaggatagaaaaatcgcgctctgtctctacactcgcggtttggccgttgatgaccctctgggacgacataggcgaacgctgaaaaggcagctcctgatccgtctccagaggaagatcgaaataaagatcaataatttcagacggcctcaaaattgatgaatcgggacctgctggagggaagtcttcatgtacatttagactacacccgagaacaatatgttaagataaaagcttaccagtgggcgatgctttgatctcatgagttatttttcttttttttgccgggggatagcatttgtctgcagaactgccagtggggctgggaggaaccatgagtttccacttttccagagcaagctgctctaatctatcaaatttgcagcagcgagttcagtttatatgctctgaggctctattcaagtgcacatgagcggccataatccatttctagtttttctcaagcctatttatagaactatatctcactatggcgtgactaggtttgcctcatgtatcaacaaacaacccttttcaaactcaaagccaacccagtttgtcgaccttgctggaggtcctccccagatacatgccacaagaaaatattatttgccaacacacgctagtccacattgatgggattgggttttccggagcactcttgccagtggcctgtattgattcgtacgcagaatgacgagagttttcagcggggtgtgtttattcacttgtatcttttgacatagctgctaccttgatatcctattttaagaattgtcgtcccttttcgtgagcaagcagttacccctagtcatgcaagtgccgcgattggatgatcccattgtttaacggtatgttatctcctgaaacaatctacgtctcaggtgatattgcaactagcatttggtctgctattaaatgacgaactgaggaagtagtcaaataccactaggaccattcgggacaggcttattcatcgttcacccaactcccccttgtattagtataggattgcgcgcagacttggaaatacggtgttgtagcacgccgagggtcgatcttcagcgacagtccattggattggaaatgctccaagcggcaaaccagtcaattgctgtgaccggcgataaggtattgaacagtgtcagcatggacgcgactctgaaaaggtctatcgctaatgccgggcttcggccgagccaggcttttcttccaacagatgcgaacgctcgctttaatttgtttcggctgcctttggtaccgctcggcgactgatcttttgtcgagtcagtatttgtccggcgccaaagccttcatcttcttcatgctactgatcgttttgcagccaagttgcacatgacatcaatgcgtgacacagccatttcgggtccagcactgcggtatgcacattcccaggttggatgttatctttctaccgaaaactacacacaaattctaggagttgagacgcgccctatgacctacgttcaaggtcaccaaacagacgtttgtcgagttgtttatggggaagagaccttgatcgtgcctttggtgcgggatggggaaccagtggcatttgggtgtggacaggtttccaccgcttgccatgtttcttcatgtgaaaatacccagtgaccattagcaaaagcatcttcaaaatcgtgagacagtccttcttgttgactcgcagtggccaaccaatcttggagtttgtgcaacatattcgtcaccttcatgcctttattcgcattgttttgatcgctggtatcatccaggctgaatcggtttttactagcagagttgcgcaagagctctcgcgattcccgcgattgtcctttgttgctctccgcctgtcagataaccaattcaccggcacagcgaacaccgataccggacatagactgttcaacatcgtgcacctcgatgacacagaagcgggagcatgatgtcttgtcaagattggctttcttgatcaatcttgtctggtaaattcaatcgtgatggcagtttctacttcagcatggctcgaaatcataagctccgcttttcagtcgcagcataccaatcctggaaggtagagactgactcgagaaacacgcgtcgggctcgctattcatgtatttcttgattctcagccgcgacggccgaaaatttgcgcgtgatctattccgcatggagttgaggtagacacaccgaggagcgaatatcttatcctagtggtgcaaccttgggtaaatctattcgtgtacatagtcgaggaccctaggcgctgggtgaattcacagcgcagggacaagtcaaccggatgggtacatctcttagctgccaaggtttgaaagaattcaccttttgggtaatgagctagcctaataggtagcccatgcggtctggggatgaagtctcaaagaatccccatgaggttgagacttgaacttttccacctccacggtaaatctcaatttctagcaaggagaagtcaataggaagagcgcagccaactgatctcctgaatggataatcgcaagtgccaccttcaagtgttgtgatatgagctgttgcagatcagaaatcaagccgcaccgattctatatctgaatgaagtccgaggtgtatttctataggtgcaaccatagtgattggaaatcaacatggcccattgctcgatgtataggctaatatatcacgctggattaacaactcaactaatatctgtggagcacagcatcaggcaaacttacagctgacgagaatcttaagcctatagccgagaaaacaagagaaacctttccttcattcaatcttacaaaaatggagtgtgttcttttctttttttttccccttcttgaatagtattagccgttcgacagcgtccactcctaatcagatccagttactaatacccagatacaatcagcaaaaagggaaactagaccatgctcagcgggcaagagcaagtcccgtcaaatatccaccccacctgtagcggaatcatcactctcagcctctacgctaacctcaatggggtaaaagggaaagccccgaggcctgaacttagggtccatatgattttctcggacgctacggccggccccaccttgacggtcaagcattactcgtagctcttcaagggagagattagccacgcccggaccgaggtcggtttcaatgtcaacaatggttgaggtgcctcccgctgtcgagtccgcgaagcccgtctgcttaccaacactagtagcgatatcatttattaggccccccctaacggtgtcgatcatgcgtagcagaacattttgttgatgctgaaagcgcatcgcggcattctgttcgtgcgtgcggacatcaggaagtcgccagttcagatatagcttttggtgagaaggggggctcgcatagcctcgcggatggcaagaaataaacatatggcataaatagcaggctggcttgctgcatccgatgtatttatttttctcgttgaggaatctgccacccgtctgctcaaagtgatcgaggactaacagttccgcatgcacgcgcgttttgcctttgcagacatccttggacagcagccgatccagttccttctttgagtagatttgttgcacctgctgcaggaatatatcttgtttgaccggatcagagaaaatacgatggctgatattatcaatgtcgcaagtacgggccaaaagagggatttggttctcccgcgacctgccaatcgtttcgatacgtaagccacgcgatagctctaagcgaagcctgatggtggcctcgatcagtcgtttacactgagccacgtgcttacccagtttatagagcaggttatggagttgctcaaagttatgggaatgctcaaggcttccagtggtgtgatgcaaggctttgaatacctcccggtcccggtagctggagagggccaggttttgcatatccttttcttgaagctgtaaaccttcctttgaaaggtgtgttgatatccatttgcgaaggttgatgatgctgtcctgatctactcgtggtggtagcgctttatcagcttttatgtccagtaagagccgctctcttagcagacagggctgcgtaccttttaatttaggctcggcattcaatcgtcccatcaccaaggagaccagtttattcacctgctgatagtattcgaagatctttggggcgttgaggcccagcacgtggacagtcaaaattttcatcacctctcggccctcttttgtgtccagtcggactgtaggattttcgataatccatgaaagtatgatgaggaccttttccagaagagtgacgaccgccgtatcaatgccatcgttcgcagctagcagaatcactatcgcatcgggggtctgttctagggccgccgcggtgacgtagccaggccttttccgatacgcacatatataggctatggcgtccacaaaggatcgatagcttttagtggcacttaatcccgggccctcggggaagatatcacctggctttattcgatccccccggacttcgcttaggattcggagcaagcagaggggctcatagagcaatcgtaatcttttaggctgatgttccatcagcgaagcctctggaagtcctccgctcattgcgtcctgctcgagcatttttttagaataatgatcacaagcatacagagtgttctttacgtgtgaatgtgcccactctaagtatgacgcgcatatatataatctcaagttgattctctcagccccgttatacttcttctgactcactgcgcccgggcgatctcatcgtctatctttgctgcccaacgctagccattattttgttgttcttttattccttttcctttgcttccagtggttgcgcccccctgtcatttcttgcaacggctgccaacgagtatccctatttttcggttcttctcacatgctacatgacgcaagttggattggagctatgtcacacggcgtcgatcgtcgtgcaaggctctatgtaatccagctgtgcacaagaatttccctgctgcagtctcaaagttgagagttcatattcgccatgtatgcgtctcttttcatttggcggagtaaaatgaacccgtgtctgccacgaaagtcagttggcagtacgaccaatcccgcatggacaacacatgctagagaaagatgacacgtcacgccctacatcacttcctcgtgtacttactcgtgtacttactttgagagcccgttaatcgaaaaatgagatgccacgtctccagactaagaccttgcggtgagacacatttggccaatttttcaatttgtactggttgaatccttttgtaggaaaatctcacaaaaagggagtgggaagaccattgatggtgttcaataacccgccgtctcgaaaacctgagttactgctttgctatcagtccaacccattatcatggccggcctgcaagacaacagtcaacttacccactccaacggcgagtctcatggccatctatctcccgcttatatctacactaacgcacaccacctatagatattcttatcggcacccttctctttcaaatatcagtaatttcatccttcgctagctctgggatgtcgcgcaaggagactgaggttagcgcgctatttcagccacctctagctggctgcgagactcacgcagatacaggactattgcaaagatgcttttcagacattcaactggatggaaataaagaggtctctcaaaatcgtcaaagacactcctcgaaccgctatcggagaagatagcagtgcccggaacctcgtagttgctttgctagggcagacctacagactttgccctgaaccgcaaagacttccacttttatggaacctcgccgacatattctctccttttgctaccggacaagcacatcgtcgcagccacggaatgacgagtgtggaaatgtccttatcgagttcctccagtccaggtccctcgcaacctggaggaaatagttctcacgcagtcgctctccatcggtacacctctgcgctacacgagaggggccagagagagaacaaaagtcttcagcgaattgatgagcagacaatcacactggatccgcctttgtttatggtaattgttcagtacagaaatctcacctgctccggtagggctcgaacaaagaaagaagctgcgcacttgggcgccaaagaaatttgccgccaactgaatgaagatctatcattagtgtgattattgaagagagagaggcttgatggcagtctgacgggcagctaagtcgagatagacaagtaaactcacactcaggaatgttccgcagcagtgttatagcgcaagagatatcactgaaagaacagtaggtcaaaatgaacatatatatatatatataaaccgatccagctggccgatattcataggggctgtgtgtctttgtgcaaaacatcagaatgaggcaccagtgattaatgggcgccttcaaaagcaggcatcgccgctaacacagaggagaaatcagagaccacttgcaaagaggctatcgaccagcaacatatctcagaaagatcgcctaatatgcttccttgaccgtccagctgttgtgatttttttccgctgctacttagctcactgcgataaagactatttaaaaggacgaaattcagctcaatgatcagaacgaaaaagtattattttatggctttagtataaaaagcccacagaacactaccaattttctagcggtgcagttagacaaattcacgaaacaaaacattggaacttccgagtgggtagagctaatcaggtgaaaatgccttaggcactcataccataatacagtatgtatggccaatcatgggtgtagacaactctgatttgtaatttacccctatattaacaatttgatgtgattcccggcgggtccgtcaaccctgccgaaccgtcaccccattaaaacttcaaattttacattttttcaaacaccatttacatcatcaaacagtattaaattagcaattaagatcttctgtagagaaaatctgaattgccaaagtataggggccaaaacaggaagtgcaggttcaacctggagttctagcgtaggtgaagcataagatgtataccttatactactacctccctggcaaccaatgtcagtagtaaggcctgatacctttgtttaactaccaatattagatatttgcttctttgattccgccctttttatcgtctgctttcggtttccctctcgtgaacgcttgaaaccatcccgcattaagatatgcttgtgccctagtttaaccgacatgttgtaagactgttgaagatcacgttttgtagtcgaagagatcttattagcagttaaatccggactcatgtcaagcctacatttgcgattttcgctgcttgatcgtccgagggataccggtagatttattgctacctgatgttgagccttgtgatgatggtcgatctggtagaggcggagattaaagacgaatattgagctttataacaaccgattggcgcctaattgtattagacctgtagctacaaaggtactctgaacaatagaatctttaaatgaatcgtcacgagctgccggaaagatatcaagaaagtcatcttttttgatagaatcgatgcctaaccggattattcggcaacccgtgatccatagacgcgctttaacacagcaaaacgaccaacatcaagaagtcgtaaaggatgagaggcatacagagacatatagattagtataatgttgttttcctggcaaatcttatcgaatgttgctgtaagatgactgttatggccattgaggaccaaaagacgatgttttctttttgtctgatttatagtatgcagaataaagagccttgagagccgataaacgccaattttataacttgtccagctatttagactaatgttgagagactaatgctttggaaggtcgttgaaccatcgttacataaaaacttttccccttgaaaacaacgtatggtggaagcgctcgtccagaggcgcaaattggttcaataacagtcatctattcacaattgccagcttataaaacgcccctccgactggtgtgactgtgtaatatttttgtggtcgcactgattcccatcgcaaaccctgattcgtcaatgttgtagatatcatcggaagtaataccataatgagtgattgttctttcaacaagcttaaattattcaatgatagtatttgggtcttccaccagggcgcgtttgtaatcatatttgcgagagaatcgagtagtaagctcaggatgtcgtttgatatattgtgttggccaatttttgccaacggtctggagggtatcatctccgcagtgctcaagcagtaaattggccatatctttcaacatcgcgattgtaagcgcagcacctctctgacccatagagattaaccaatcttgaattgatttctcttctagttgcgtgaatttctggcctgtgccccttgcttcatagagattaggaatgcctttcatccgatctacaagagtcgtgcggggacatcaaaagggcgagcagcggtaacgaccatagtaagtctaccattttgaaaagctttgatagctaagaagattttgccctcctgctcgattgactttggggccttttggctgcgctttgggggcatgataggcgcttaaagatagattgttgggagcagaaaattggggtgggatgacggacccgccgggagtcacgttatataaggatcggtaattactaggcctcgccaaacgcgggttcggggcgggttttcatttttccaacccgcccacgggtaacctatcgcgggttttgtatttcacaaacccgcccgtgggtttttggaaaatcttcgtgggtacccaaattacccgtttatacctatcaaaatatataactgatacataatatatgattagttagtctgtgtatttttggtaatttattttggtaccgatttaatataggaaatataatctaataagataaaatatctacccctaaatatatatattaataacggacaatagctatactatattttgggccgattgtctactaccctatattttcggatgctataaccagataccttaaatttaagtaggtcctagtcatataagtatcttctatattagaattgtcacccaattgagataagaaagctagttagataataataaatatatacttaaggttgtttatagtcgcgcgggttttaggtacctataggttaacgcgacctataaaacgcgttagaaaaaaaaataataaaagagtcctaatctaaggtaatagtatctctgactatataatactacattagatttgaaggctaagcctcggttacattaagatttttagaaaaatgtcgtcactattaactaattgatctttaagtctcttacccttaattaaaccgtcctctgattccttcttagactctgatttctaatcctcggtataaatattaagattatatatacttaaatcttacccccctattcctaacgcaagcgaatatactaagtagctatatagtcttttagggaaccccgatagagtagtatatctagttaataacccccgccgattctaaaacgtgtcggaccgaaccgtagaaagaactagatcctatataaattagagaacttaattaactttctaatatagtgggctaaaatggaatacgggtaagtactaaatagcgaaggccgatctagaattaagtggtcgatagatttgtattataccgaagtttagggatacttcaactaagttatagatatcttaactagccgacctaaggtaatctataggtcttatttaactttattagactacccgtaatataataaatataggataagtgctataggaaaatattagagatctaaggcttatcgatatagctagaaaagatcttactattagatactcgtaataaactctatttagaaggccttcctaagagctttatctaattataagaaatttactaccttatagcttaaagaaaggttgctaaagataatagcctatttacaattgcctttttagactattaagaatcctaagttcctagtactacttaatttaatttactctaacctaggagaattagaaatccctttaataaagactctacgacgttgcttatataactctattatagcctaatagaagtcttagttatataacttacccgaagatacgaaagtttctcttatattagattattagactagccctttttagtaagtatttatagcgattatagtatactttatcaataaagattagaactatcgtgaaatacttcttaggtttaagcctttatacagaacttatagtagcgttaatctaaacgaagtacttctttagttacttaaggatagataacttctagattatatctttagtataactatagataatataataaataataagactcttatctaggccttataggagttacttttattaggcggtactattaatataagagaatttattatacgcgtactatatatagcttatatgatttagctttacctaaagtaactactaggttatattaaagctgctctaaagaataaagaagtaagaaggttttagtctaatacttaagctatctatctaagagattctttagagtatagtaatatagcgtatactctcgtaaaggtatatttaacctagaaaaaaaagactataggaacttttattaatatttttcttttaatagattcggttatttactgtctttataaatataagcttataataaagagacacctttttatatctttaatcgggtaggactcggcttttcctcttctataatatatagacccactagaactctacttttttaatactttaaagagcgcgctggcttaggaatactattaataaatactaccgagactataaatatagctaatttaaagttatagatactaagtagtagtaaattgactatatagttaatctaataaggccgttctttaaatttactatagctctaataaagactaaagatataactatctatagtatctttcttatatataagaagcttctagaatatatcgaacgcttaaaccggaagctaagaaagaaaataataccctagaaaaaagatatatacggtactatacttatagtaaagtaaaagttaaaagattattacgagaagacttattataactatagatttctctatagtatagtggctttacttactccttagtataagctttaataaagactaaagatgtaactatctatagtatctttcttatatataagaagcttctagaatatatcgaacgcttaaaccggaagctaagaaagaaaataataccctagaaaaaagatatatacggtactatacttatagtaaagtaaaagttaaaagattattacgagaagacttattataactatagatttctctatagtatagcggctttacttacttcttagtataagctttatacttttgataatatagagtattcgtagtatattagcaagactttaaaaagatattataaatatctacgattatcttttatatagtattaataaagaaacctagagatactattctatactatatagcgccctttattataagccttagagttagaacggcttcttaaactattatatatagtagaaataagcgaaggagtcaggtataacgaggttaatcgttatctctacaagtataagtatacctagcttacttaatctaaaagaccgctaataatcttagcgactaccttaatactaccgcgtatatattaaagagagaataagagtaaattccctatactttcgcgactagctcgtgatttactctcagttctagctactagtataggagttaaaaggctatttaatagtacctaggatatttactattatcgccaaggatctctaaataaaactataatataagacttgataatatatatatactctaagaaatttaccttagagagctagtaatcgaatctattagattataggacagcggaaggggaggattaggaaaatctcgaagaatataagataaataaggagaataaagacgaagatatagctattagtaatatagacgagagcgaattagccgaagatacctatataagtcctactacttagagtactctaggatttgaaagtattaccttataggaacttctgtctcttaatcgaccgtaagatacaacgataaccgctattcgtctagacctagagagcgacgataaagatctattactacctctagttatatatctagaagagagatcttaaaaaagattattaggaaggatgataatacctttaagccggcttaaaggctataagctatattagtttatctgctatagagctataatttgatataatctccttataaaaacacttatcctaaactataaacttttaaaactaggctatgattctactatagttaaggcttttctgaaaagcggtagtagcatatagtctacttaatagtacctttaagccggcttaaaggctataagctatattagtttatctgctatagagctataatttgatataatctccttataaaaacacttatcctaaactataaacttttaaaactaggctatgattctactatagttaaggcttttctgaaaagcggtagtagtatatagtctacttataccgggataatacgttaatctaaataaataattttgtataattttgtgctagctaataaatccttctcttttaggagttataggtaatttaggtacctgtataggtcgcgggttgggttttcaaaaaataaacccacctacgggtctgctgactaagacctgccccgacctatggggcgggttttcgtgggcggattcgggttttggggcgggtttggcgaggtctagctatacctccaaactctttcttcttgattgggagaaaccaatcccgacgcgcgcttggctgggtgaggccaccgccttagaattctggcaaaactgtcattgtaatgtttgtttggtcagtaataagttatcgtcatagtactgtatattatatagaaccacttggaatcgcttggtggatcttatgatcttactagatcgctagctagcttcctatctcccgtttgctatattatatctgcttccacctattctttctatatatagcgaacggtagtctttgctcgctagtcatagtgtaatagcctctacttaccttatagaggaactaaacctggctagaaaagatgttttcgtctatcttataagttctactatctagtacacttcttgtttataactaacgttaatcctaatctagttctcctatctaaactttttaataaggatcgtgatcattataagagataaagtaatctcgcctcgataatataacccggttaacgggccacgaattataggaagactactcgtattatatcctaacgcctaactattatagcagccccttcgtagtactatcggacctaaacccttccttatctagtgtagttgagaatagcttagacttatcgagaacactaccctcactcaacctcaaaactttctagttatataagtaggaatacaggagagcctataacgtagacctactaacatatatctactactagatagagtaacgagtaactgttaataataagagatactatatctataacagtattataaaatagttaggtatagataagaagagcaagctactaagtaaggatagtaggctactcgagcaatagtataataataactttatatagatagagaaagggggaaagtacttagtcctacttacctaagcgaaaagataccgagctatgatatagctaggctcaaatttcgaagtatatatatatattatcgataggaaataccgacgatataatgatatcttaataactacctacgatactggtagaataaggtagcctagagaccatagcttattatcgaaatcacttttaccgaaaactagtactagtataaaaagcggtatatttataaatagcgatcattactaataacagataattactactgctattgtggtcaggggttgggtttttctggcgtacccggactcatgaaggctttggtcgtttgagctgtccttacatttgaaaggacataaaatgatgtgataaatccgaaaacttgtctttacagtctgaacagcttcctagtaaccatcgataatttgcaacgctgattgattgatgataataggctataacgtcattaataaacatgttcagcgtgctgaaaggggtccttcgaaagcacatatggttggttttccatgaaagaaaggaagtactactgcatcaaataaacaggcttagaatggttgcgttcacttgataatagcgctattaacccataacaccaatgtgacgttaccatatcaagcctcgataagctagtactattcgagatatagctagtaagccgtatactaagttcttataaaacactctactattaagaaggggggtaggggggttgtagacaacgtcataaaaacatcaactttcggaaatgctaaacttaatatctaaagaacataagtatatatcatatattaagcttacggcttactatctagagatcttatatttaaactacctatcgcaattattataataaccgacaatcagaaaaccttcactctttctaacggcgcttagattcctactattagtctcagaacctagtaagacaaggaggcctaagaagtagtagtccttaccgctctttacgtaggttatcgctatattaatatagtaagatagtagccctctcccttaataacttaatatagataataaggctaacttctatagctatagcactgagcctactattagtaaagctataaagtaaagtggcattcctcgagaggaaatttttgttaccagtaagctctagaacaataagcatcatcctaaggatcttaactaagcagtataacttttattaaatgatctaggtctagaatatctcgacctattcttaatatattagcctattacttttaagcgtagagataatcctttcccgtccaataaagataggaagctaatcactgataatattgactatctcgatataagccttattggatagtagcctcgagaatacctactaactagttaaagatatatagagctatagaaggccttattaaatccggtaaagctaaggctatcagaatttctaacttttcctaaaaggaagttgaacgtattcttaataacgtggcgattaaaccggccgtatactagatagagctctacccttagcttcaataaaagatattctacgacttctatcggaagaatagtatttatataacgtagtattcactatttagaaactaaaatgaaatttacggttctcgcgaggaatatagttagctagtgaatgatcagaccttagtagaaatcggaaagaagtacagaaagaccttaaactaagtcgctttaggtatatgtactacttataccgagataatgtttctctaactaactaacccttttagcctagggtattatatatagccgttccgttatccctaaatcaaagttagctgagcgaattaaacagaactttgatattactttcgagttagagcctatagatattaaaaatattaatacaatcgataagaagctccgtttcaacgacccaagtaaagactttagctacgaactatattcaggccttaataggaagaagaaataaggagaatttcgattaacctttatcaggatactagagtccggtaagtacctgatcttaggaaaagagatatagcggcgtcgtcgacctagggattcaatcatcatatataggtataatctcggcctttccccaatcaatacactataaagtagtctaaaaagctaatgggaatcttaaaataataagattgatttcagtgggtatcataaaaatgtaatccgaaagaattacctaagcttattacggagaacttagttcgctattacagtcgttgaatctcctagctataaatcgaccttcatatattcattgcctacgacatttcttctaatataatagaaggtaaacctatggccttggcgggaatcccttagaccaatagagaggccgagattgacagcgatgtttattgattgttgctttgttatattgatgttaaagctatatatatggattgagggggacaccaggtagcaaacgtatagcactttcccgtaaaaatacatctagtcatgtcttaatactgtactgtaagatacgcctatcagccttggaaagcggtctgaaaggcggagccttcgctttctatccaatcagaactcacgaccctgggatttattttccaggaaccaagtcacaagagtgcagaggtatagctgatttcgaataatactataacgtgtacctcttatatcaataccattaatttagcctcgtcattgtagaatcgcacggcagaagggtagattgtattgttactcttgacaccatcctatctcatagcatatgtatgttaaatctctatcacagttgagtttaggtaagcttatccccttataactttgagtaaggatatttgcaacttaacagtggcaagcctagtaaaagacacgttatcgtttgggtggacatatcatttgagtggttgaccctggggtgcgacggtctgtaatttatggtaataaatgtaaaacccggttatcgggttctacgcggaattttatctgttgagcccaagggagagctcttctatttgccgtaagccagatttgattctgtattcagtgatcgatcgatacctacctacataaatcctcaccgtcggcatatatatacagatgggggcgctcgcgcggccgtggatcacgttaatatactacccctcaaatcgacagtaagatctgcagaaaaggaacttcgtacggactattacgcttagagtgggagctttctagagaagaaagagtgcgtagagttgaaattatttcgaatatcactgcaataagcgttctgcctagtaagctctatcaaggacgaagttttattagtgcgtctgaggaacatttagtgctctcaatctgcctgaccttgaccctgattcgtaagggccttggctgccttgctcggtatagacttccccactctgtatccatcttaagtatctctgatttgcctttataataggcttcatccctttgcatattcgtcatgtcatcgagaaattactttagcaagtttgcaatgactagacacgcatggcggatgtaggagctgccgaagatataaccggggctagaaccgatgttgagatacttgctgtggtggcaccacaagccaagctgtaagaagacaccgtcgttaaaacagacgctacttcgtgattagcattatgtgaaagatttctcttccaacatacccagttcaattgcagccgcattagtctcaccggccatagtggggcatgagcaatgaatatagtgagtataatgatttgctatagtgtcgaagcaatctatacaggcagctcctccgctttgtattcaataaagttaatgagctagcctttcgacgtaagacgatatgcagggggaatgatctggaacccacccattctggaacaataggcttccatcatcatttcgaagacaatcactctgcttcagcgacgagatgtagacagctccatcatcgaaattcgggcacttataggtgaaagtgcgagaatccgaggcaaaatcataccaacattggtcggccaaggccaatggcagaatgaacaacgcgaaactaagaatggtaatttgcatatcgaagagctggatggagcgagataataaaaaaaaatgggcgtttctgctttatatgagactttgtatttatgtcgtgtctggctcacctattataatagatgttctggtccattttactgtttcgtgaatctgtttgcttctccagaagagttgtcccataatatgtacgtaatgggggattgtttttctatacatgtttgcggggtttggaggctccccgtgtttctcctccatagtacatgtgaaggtgatacaatacgtgtaagttcatagagaaagcactgtatgtattctggtggacgaagaggagaaagagaggacgagagagcaggcaaactatctgggttctatttacatgtgatgccttaggcatccgggcatccaacagaaggtccactataacgtaattagtatctaaccaagactgccatcacgtcgttaaaatttacgtcataggcgatcacttcatgaagccattcgggagagctatcggtaagtccggcatgaaaaagttcaaaccaaagtttctggttgtcgaaattggcaagtaatttcagcaattccgctgcgtctggatcttccttttctaggcgagagtaatctgggcatctaacatccccctcatagaatcctgcatgtactccctatcaagatctccagttccggcatatatagtaaaactctgcaaatttcttgtggatttagcatatgccaattagcttagtaaagatcttgaattgatcctttgcaagagccttggtaaatccatctgcagtatttcgcttggtgttcactcgatgaatctcaacatgtccttgcgccactgtatctttgataaagaagtaacgaagattaagctatctattcgccgatttgcctcctttcttcgagagaagtaattgtaagttgatgttatcagtatagatctctataggacactgctctgggagcataaatgatcgtgcgatcttgtttaaccacattacattacaactaggttgatctagtgtataccacttagcaactgtcatcaaattggctgtgatcgtctgcttctttgtagaccacataataggtgatccagtaaggtactagacatttccttctatcgatttgctatcttcctagtctatatatgaagtatctgtatatatatagaagcgaagttcactggttcgaccaaggataattccaatatcaggttttcgtctcagatactttataatatattacattactttatagttagaaagggtgggatttgctagtcaatgctataagtgtatcactgcgaagcgaatgtctggtcgtatcttaactgctaactagtttaacatccctacaatagactgatattaatcaaaagtatcgttatctagtatattggttatatcggctagtatctctctctatatagctggcaatggcatatctttttagctagaggttttagccatatatagtaccttttacatatacactttctgtgatatagtgattgtcctattagcatagtctctgtcgagcgtatagtttaaatactactttagcttaccaaggtcctttaagtcgtagtactaacgaagttcgctaataacttactcaatatcatcgtcggatggtatagcaataatgaaattattaatatagattattataatagttaaatttatacctttacctttgatataaacgtaaggattatcatccagcggacgaaagctaatctaatatagtttacagtctatctctttattctataggaaagcagagtcttacaatctaaagagcgcttgattaagtgtatatacccagtatttcttatctccttatatatctgtgtactcaaaacctataggttatcttatatagactgtctctacatcttcatataaagtattgagatatacagcagtaaagttaacttgcctccattttagactatatactacaattagtgtaagaacgattttaatcatacattcggcgacaatagggacatatatttctccatcatttttatcttagaaattgccacataccacctattgtactttgaaatcgtagactttatctctggtattagatttgatagtgaatttctattatcctggtagtaccttagcttttaatagcttaaggattaagctctatatgcctttagccttaagatcactaagttatctttatatagcctcttgccattaaggctagaaagggctcttttacacttacttatatatagatagcaagttaatgtcctttatatatagcggctttctattatagagaaatggtttgttaatatcgactttatctattattatattagctattacagacatcgcactaggtcctatagacccctatccatcaccctccgttacattattaccacccgagtcctttgcctttgcccttatggcagctcattaaatatcttagtctcgtttctcatactcgatagtgaggtatttctgctttagatcgtggtatcggtcaggtataatcccaatattcgcttatctcaatcggcggggtagggtaagagccggtatagctaggtcctaagagataggatctagcgataacttaattaagataatcttatagcttagtaatatctctgatcttatagtaaccggtgtgttcttagtgcttatcgttatctccgttatatcgatagcctatatgatcttacgacttagtaatatactgatttatcgagcgggtatagcctatatagtcttacgacttagtaacacactggcttaaggaactggtagagcttatgtgatcttacgacttagtgatatactagcttattaaacgggagaagcttattgagtaggagatgagaaagggtattagtaatctattctctatcgctctagagaaggagttatatcttctaattcctcagtaatagctctcttaatattatcggtatctcgacgaatattatctatacttttagtaagttaagatacttaggttaatagttattaaagtcttcttctgagatcttctttcttccactcaatatctaaaacctataagacactcttagtggtaggatctatgatctcagtgattcttacgcctattatcataggctcctctcccacagttaggagaaaactttaaaagagtttgcactattttattagtagaataattattctctatggtagtgccttctatggtatctcaggcattatagatacactactataaattattagaagataaattatagatagcgtaacaggtacttatataactaattgtataggagtttatatctatagtatacgtactacttactactacttcttttctggcttcaagatcttatcttcttgcgatagtaaaataggtatgaatctaataatattattattattatcaggatccttaggattagtaggtactttactagctagtattagtcctatactatcgttatctctaggttatagaaaactaatatcacaagatactactagtttctttgtgactagatcctacactttataaacatgactaccgtcccccttatagctaataagcatacctttctatactctgggtactactttcctagcctatgtcctcttaggcttcggaatatggatatatacagctgatccctatggtctaaggtgctttaaggaaggctctaggtttataatttcaaattcttaacgccaatgtataagcggcgagatcttagtctttagattaactagtctattatagatatagatggctatatctgttatatacggccacatctcttccagtatcttcgtatcgatgattatcgttctctatatatcattgatatatctaccgaaacgttctactgtactatttagctctgtggtataaggtagtatagtcttaaaagtcatactatacttcttaccctatttgatgaactctttaaactctatactgccatctattcgccagatacctaggtatctgccggtaagtaatttgatcttcttacagaatatagtaagcttatggtaagtatcacttttattctttagtataattccctcaattaatcgagtagtattattaacgactagtagctagtagttctctccatttagcctagtaggttttattagctatatattaatatagaatttctatactatatcttataccctcgcctattattaacgggatatcttaagctttaacttaccttaaaaataggtatcataatcgaagtattccgtgctatactacttatcatcacctaattatttagtatattatagtatggaagtaatgcaagcttttccagtatatccgagacgtctgtggatcttatacgtagtcactttgttcacaaatccaatctcattgttatcgttagaatctatatccgatttaatcttattagggttattatcgtcctttagactaataaggtataggatacctattaatatatctatataccctaggatatctccccttctatttatgagattcttagtatatatatcgtaagagatatcttattctttaagaagcttttgtatactaaatagcttactatatcccctaggagtatagtaaccagttattataaacgagtacatctttctatctaaacctagtagggcagcccttataatgactttactatagcctagtataacgactctattaccagagtaatccttatatatataagctgtattagggtaatccagttagtatgtgtggaagtccttaagatcgtatattaatatcttattagaactagtatctagtaaccaatcattcttcctattaatagaattggcagctataataactatattattctgtctatcttaatattaagttctctagatagcctttaaataggcccacaagttaccggacggttcctacgaggctagtaggttatcactaagataggcacatctctttacagtatatagtctaaagccgtagaataaatacatattattgtcatccttttatatgctattacgcatctcttttatatagtcataaatatctttactatcggtaggctgcttacaaagacctctcttcttcttctttttagtagtagctatatcttcgtcgatagcattaatatctttactggattaggtattattatctttattataaccattattatgactacctcggctactacggtttcctctacaaccacctcttccattacctcagccacagccggtattgttattatagacagtattagtaataccttctatattagtagctgcttagagtgctctctagtactcctccaccttattgagattaagtttcttaggtttaagacttacaacttcttccctaataaactagacctttttgacttctaatttaaggttttaaaggacttatgataggccgtgtactaggtacagtgctaccttaaatcgagtaagcatatggtactgtcactagtactccttaatgtactcgcttactaagttataatccaatcgtttcatcttatcgaacttccttatcttaaggaatacagtttacatctagtcactgccttatattatagctataagcttatcgtataattaatcagtgtacttaggtatctttaacaaattgtacagcttattctatagtataacatcgatttgattgtatatctagcttataactaagtgagaccagtacttctatcttttaaacgaagcatgcgacttaggaggtcagggaatatcgctttctagtagctattctaaagtatatgggatcaactggtaagctagtgcttgtttccaaccacttagattagtgtcattatgctccagtgtccttactttctgaattttagtcattgcaatcgttagcagaccatgtccctgataggacggcttattatcctcatcctcgctattactggcatcctgcgcaaattagatcggatcgttcaaggacaggacttcattgggatcaattgtgttaggcggtacgccgggaagggaggtttgtgggttggtatcccccacatttccggtcgcgacgtctgccatgattggattgtaaagctaaacggagcttttaccggtagggctcgaaggatttcctggatgttattggctggatccgaatctgtgtagtatactacgtacaaaggtggatccactgtggggtcagatcgtcaaaagtctccagatgaaaatagcttcagagaaaagagttgctagtggtccaactagcaaaagaggctcataacctgatacaatacgtgtaagttcatagagaaagcactgtatgtattctggtggacgaagaggagaaagagaggacgagagagcaggcaaactatctgggttctatttacatgtgatgccttaggcatccgggcatccaacaaaagaattctagagaaaggtcatggtatggagaagactatgtgctagcttcctggcacccttgtagggcttcaggagtttccagttgacgtatttgaccgttctaacttctgagaacattactggggaacatgtatatattccccaagaaaaagtgaaagtatgtctatcaaatattcgtacgtccccgtcgcaaatcttcctcattcgggcaaagatcagaatcattttctcaaagattggccagatacaaacaccgcgaaggattccgaaaagacatttacttttcagacaaggcggtagctattttcatgagatgcgggacggcgagttaccattcccgcgtcgaatacgccgctagaagtcttggatcgaggtcttatatctacattcgccatttgaaaactgcagtgcaacatgtttgttcattctccaaagatttcgatgtacggatcatggaacattggccatttattctagctcatttatgataaacagtatctttatcattcattgttctttcatcgatcgcatcgccgatgcagaaacaccacacaatacagacattcacctgaatgaattcaattcatcatcgcacaatgaacaaccgacatcgaagctccccaacgtcaaaacaaacccctccacattttctgtattccgatgacgcatgggcttgttacagaccaaaagtaagaattcattggaaataagacttcttcgggtcatcatcgaatcattgacccctagtaagttgttcgtcggtttcacttagtgaaaaacatgctgctcaatgccatgcagactttgtacgaacagaaaaaagcctctttgaacgatagacgttcggtccactagatctcaccacaaatcaactgtatctgtcagctggtgattgagatacggccgagctagagttcagtacatttcttcttttgtcgaagtcaccatatatttcaagccaacaatcgcggtctctacagtcgtctttttctccgcttgtaaaattcatgtgacagggaggcttgtgcgcatccatagccccagaaggaaaatcgatccaaggctataatgttcatgttagtaagtcaggtattaaggacgtatcttccagtggcacgggtgaatagaaagacaaactttaggaaccggccagtcagagaagtggacagtcttggcttctttgaaaactgttacaggattccaagtctcgcttgagtctccaagatacttagtatgtgattcactgcggaactctcctgacaacaaggtgtaagggcggtgcgggatgatgagcgcatgatctttgtatatggtattcacgatttccatatcgtagtctgatcctcctgaggttttgatagcctccaatatacggtcgaatgcgagatgagacggttggatcagcataagataggtggtcatgacacgatgatcgggatctaaccagtaagcccggggtatagcgacagggcacggaggtagaaaaaataattcgtccatatgctaaatacccaatattagagatataaatggctagaatattatatgaggtagaaacggtacttgcaacatagtgatatccgagtctaagctcagaacacgatcatactgtgtctgattgaaagccaggagtttggtaaaactctccgaccatgtcgctagactgtagtcagcttatcgattctcgaagcatgaaaagtgaatttgacatgcgatcggcctcgtttctagtctgcacttcgactggtaatagtttgacctggtattcatcgcgcgctttacgcagcaaccggctttgcgtcccgtgatccttctcatcaactgagaaatgtaacggatacattaggaaacgatcagccttgctcttgaggcgatgtagagtttcgaaaatcatgaccgaattgcataaataagcttcactggtagcatactgcgaatatgcaaaccttgaccagtccacggcagtttcagctttccagtgagagggaacttcgtgatgtggcggtctcgtctccgtgttccttttcgggaaaatgcttcgtgttggaacaaaagcgaggaagagaattgcgatgatgcctatggttcgtaaggtcgcgcgacattttctcgacatgattgtcttcctagagggataaaatggggactcaaattgagagttcagataaatgaaattggtactaggcaactattacctaacgaagtgtgtatgaggtcatagtaaccactagtttttcaacaatgaaaagataaacggctggatgtgggatggaatcaaataagaactttgaacaagctgcagagtgcagaagcgggcggcctctgtaacaaccatgtatcgatgaaaagtccaattgacgaaattcgcttgacgagtatgtccgagggttgaaatttgaggtttcttaaagttttttctgttcatgttagaaacgtatattccaatttggaaatttaaaaattaaacggagtttataatcttagtcattttataccaataccctagaatgatcatgtttatacatactgtcaacctcccttcagtgctcttgatttgttttttgacggttaggaaagaagaagtcttacaaaacagatcgacaacggtggtgttttgttcattgaagtcgcgtgattcaaaacaaaatctgtgacagccaaggagtaatatacgcgaggagtaatatacgagtttacagactctcaccacagccgggtgcgcaagagcgaaatttggaactgaagctctattggctgtttagattgtctgctcagtggtccatgatctcgattagagtgtctccagtagccatctcaacgcgctggtgatgacaatgaatctatttggtctatatatctatctcgctttgaatacgtgctaccatatgtaaattttgttgagcctgtcgaaatcggaacgtggttgatagatcactggacggcttttgatgatgcttgcgtttaagacaaaatttacgacagacaacaaaagagcgctttccaaccttcaggctggactgggaaaatagagtctgacgcagcaaccaactgaagaattctcagcctataccaccgagcagatcaatctgcaagttgatacgaccataaagattggggtagggcatcagggcaagggccctccacactgtatcacatgagaaggcagcttcagggaactaaggatctccgaacatctcgaagttttgctgatttctcccgtatcagtttgattggccgccagaatggacaatagcgattcaccgtactggatctcggttcaatagttggatcggcgtgaggtgaatcaaatctacgggtttgcgacatatcaaaatttcctatttacccaaaatatcaaaagaaaggatttttcccagccctcatgattagactgaacgaaacagtcaaaagagaaatactgactactgaaacaaaagtagagcgtttcaacggctattgctacctcctgttgtgctttatattcctttgtattttcagccttcgaacaaaacactcaattttagctcagcaatagactttttgagtagccttctaaagatatctatacccgataaggaacaaagtggtacactatatcctgaatagatcaccaaattgtagatatctcaacgttctttttactcacgccacaaaacctccttccgggatggtgaatgaacttcacgggcaatgttatcaagactctttaccacgtgctcgatatcgtctttagatgtttctggattgatcgtacacattcgtaagcagacaagattgtctaggtgagatgtgaaaataacggccacatccctagaagcaatttccttggagatggcctcgttgagctggttaagagtcgcgaggtctactccttgaggagcgtatcggaagtttaggatcgcgagagagctcggcgaaatgatctcccagtcatccaaggtactgatcatacactctagatgccgcgacagctcgaagccatgacaaatcatctgatcgaacttttgaagacctagtacttgtaatgtaaaccacagtctcatatggcgtgcgggacgggtcaattccacgccatagttccacgggtcgggaagttcttcttggcattccacgtcccgtacataatcaccggtcgaggaaaaactttccaatgactgagattggtcacgaaagaagacggcgccgcagccatgagtttgaaataaccatttatgagcatcccaggcgacgctatccgcgaagcagatgtccttcacctttgatcggtgagtctcagaaaacgcgaccgagccaccgtaggctgcatctatatgcagccacatcctccgaccttgcgctatacgcgcgaggtcttctagggcatcaatacttccagtattggtggtaccacagcttgccacaagtaggaatggttttcgatgattttgaaggtcttcatcgatggttttctccagcagtgaaagattcattcggaacttggaatcagtcttgatttcacgaatctgatgatccgggataccaatgatacgaagggcctttcgaacgcagaaatgagtttgctcggagatataagcaaccccgttcgaacgctcttcgactctaagggtttggtctcgcgcaacaaccatcgcagtgagattggccatagaggcaccggaaacgaactgcccgcccgctgacgatggtagcccaaatatttgtgcgatccatttgatcaggccggtctcaatagtacacacccctgcgctggcctcccagcttccgccgaagggattgtgggctgtggtcagacaatcgccaagcttggaaagcggcgatgctggggacggaatacaggagaagaatcgtggatggctgacggcgatccggaaggaaaagatctcatgggcgtccttgatcacttcttcaattggtctggaagcaccaggaacagccaacttcagcaagtcaataaattcccctggatcaggccggcggatgagtgttgtctccgaggcagctgtattgattcgggttagtagtgagctatacgtatgcttgtttagatcggaagccattgttctttttcagataatcactaagaagtgtttctctggattgtgggactttcttttgtaatcttgaacggaggaaaaccaagcagcgaatattgtttaacttggacggttacatttcttgtcggttcctctgttatcttatataagtagggtgagatgacaagtaaatagcgtaatccgacatatcctattaccccaatgaccgagcttggccggttaaaatgcgcactaaaaacgttcgcgatgaatcgcaatcatcatttgatacataagaatagttttctactataactaggactctcatgtcaagttcggtcaattagtgttctcttggtacataaggccgatttaatttagattttaagcatctagccacaacctgaaaaattccccaagtcagctggataattatatgtcatgaatgagtgaggcataccgtggcaatcaaactgtcatcgccttgtttgtcaccgctgagctcccaccacatacccccaccaaggccgttggacttgatgtactcacccttcttacgcgcaatctcggtggtatcataactgatgaataaccgtgattttgagttataacagtagctagcagctgcctcatcgaggttggttaccgcacagcagggctggggcagagccttataatcccaaacaccattctcccagctaccagctcctacgccattgtaagcttggccaggaccattggtgtcactgaaagcccggccgtacagaggcatacccatgacaatcttgtgcgaggccactccgtgcgagatgtaataattgattgcttggtccgtgttgaagggagtgcttcctgggttgtcgttggatgggtggaggttggcattgtgtccagcaacggtgtcccagcttcctgcataatcataggccatcaggttccagaaatcgagatactgatccatccgagcgagatgctctttgtggtaattggcggggcctagaatccgggttagctggcttatttgagtcatttcagaggaatgcacgtaccagcaggcgatgcagcggtgagcaagaaatgatagccgtcattattagttgaactgtataaatcaagcgcctgaaagacttagcagagccggcaaaatataagcgaaaacttgcctcgcgaagacgccttagtatatctataaattggcccgcttctttatcattagcagggtactatccagtatcagcatcaaacagcgagagacaagggactatactcacttcaaaatctacatcaataccgtcaaaacccaaattcttcagcagctcgatagagctattagcaaaattctggcgtccttcctcggtctcaaatgattttttgaggttggaagaataggtccagcctccaatcgataaaagaaccttaaggttgcgattcttcttcttgagtagaaaaagttgcttaacacagccatagacattgcttccgctatcagtccaggaatcagtggagtagtgtttgtcagtgtccgaccaatcatccgacataatcacctcgccggagtcctgggcattggcaaatgcgtagagaacatgggtcagtcgctcggcggggatatcttgagggtggaaatcacgggcatagattccctagccatgtttgtttagttgttttgatccagtgatggcgtattcaaatgacacgtacccagttcacaaagtaggctacggaacgatacccgttactatcacgagtagcaatgtcagttgaatcgatcttagttgacagcagactgtaggcagtattcgctagtcgcgctaggcaaaccaaaaaaagaacaacaaagtgcatgatggtggattttcaacactatatcggatgagacgagtcggtacaaaaagcgccacggaaagggcgagtcgtgttttaaatggctttgaggcaatgagaaacaaggtcagctatactcgaggccgacaaacaactctacaatgtattcctaagcgtgcccaacttggtaatacaaatcaatacttgaaagcggcggcattgaccctcaggaatgctcgacaacggtcaggccagggattcgtctgccaactatacaggttatgaaaaggctacggagaaatggaactcataccaaaattcggtggattccaacgagcgacgacaataaactgcggggtctggctaaagaacaggccagagccgcgacaaaagaagatgctctcccgcaagaacgtgtgccaagaatgaagccaacaacactgaatatagcacggctccaaggaatctctagcgacaagttgccggtgaacgcagggagacacgcaaaacaagttgatgcagcactcctaggcaaacacacccggcagctgtatgaccgattatcatagaaggaagcgaatgtgctggctcaactccgaaccggcatggcaggaatcaatggatatctccatcaaattaacgtggcagacacggaccagcgtgcgtgtggacaagctagagagaccgtggagcatttcctatctcgatgtcaaaaatggacggctcactggacggaattcctgtaacgtaccaacacctaccgaggaaatatatccttcttcctagaaggaaagtcgccttttaagattctgcaaaattgtgtagagcctgaaagattgacgtcgtagaaaccaagaatgagtggcagtcggttatgttgatatggtgatgtagagtgggaagtcctacaaaggatttcaacagtctatcccggctccttattgggtcattcgaccgttcgatgcacaaatagttggaggatcgttggaggggtcatcggcaactatcgtatcgttctctattatggatgtttcacgacgtatgctgttatacacaaaaagcaaaaagctgtgatttctctcttccgttcctaggagctcgattggctctcccaggaggtagcaatcactggcatcgataaggaggcaaaacaattgggggtatcgtataggccctgacagaactacttatttaagccgtcctatatccatcatttccttccttacctttccggcactcgcagtcccaccttcgaactttacttctcaagtcttttacaatttgtcgacacaatgatggtataatcctcctttctattcgaagatcttcttacaactaacgactgacacaatgatgcctagacaagcaatatgggtattccagctaagttcgagcttcgtgactcctccaatcaagcagctctttggcatgccgtctcgagatgcaatgtggcagaggtgaagctgctgctgaagagcggagacgcactcccggcggatctcaatggagtcacgccgctcaactgcgcaattatgcgaaacaacacctcgatagcacggctcctgttaaagcatctgagggcattttactccacgacaacattcctggacgataaagatgtcaacggtgccgagctgccactgtgtctggccgtttccttcgagcgcacgcagatgatagagctgctactcgaatttggtgcggatgtcaatgcggcgaatcggcgcggacacactccattatatcatgcggtagatcagggccgtttggaggccgtagaattgcttcttaaacagcaagacaccaatctgcaggcaccggatcattcagggtctactgctcttcacgtcgctacaaagcggaaccacaagtctatcgtgaatttgcttttagccaacccgaatgtcgatatcaactgcagagatggccacgggaacacacccctctggtggtctactcggctgaagcaagatgacatctccatccgactgctagctgaggatggtgtggatctcaatgctgtcggatggaagagcggttctacaacacctctgtatcatgcagtggaaaggcagaattatttggttgcggaacgatttgtcaaaaatccagagttggatccaaacgtcctcgggtctttccgttggacacctctcggtcacgccgcacgcgacggcaatgttgacatggttaaattactgcttcgaagaaacgatatccaaatcaatgcagtccgcccgggtgaggattccccactttggcttgctgtgaagtgtggtagaaccaaggtggttggtctcctactgcagcagggcaaacgattggacatcaactctcgaaacaacaaagatggccaaagcgccctgtcagcggccgctggctccggatatctacacatcgtgaagctcatcttggaggactcccgaacagacctcaatgctgtggacaagtcgggcaagagtgcaatgtggcacgctgattccaacgggcatcatcaagtcgtcaaggagctcctgaaggacccaaggctttgcgtcgatctgagacctattgcttcggtggcgggcagtcagtagatgctccgagttcgtcaagcgatatgggggaaggggatagccggatctgctttgaccagaaacgaactgcatgtcaatatttgtgcaatgcttcgactgtgtggttaggcttttgatggccctcggcttcatgtagccgacacaatttggccttgtccagctctctcaacattctttgccctggttggtggtcatggggtcattgatcggttggtccggcaccactgagtggttgaaccatcgttcatgttcaatctgctctctttggggatcaccgttgaaatccgtccatccccactctaatccgttaacccgtccatccgtttgaagtctaaccgttcggtggacttcgacagatgatgctccacgaaccatcgaccgatcttcacggatattacgtctctaaaacgacttctttccagaggaaatagtcagtcaataaaaacgtagctgattgtggtcgctaagggtggttgggggatcgttggaggggtcatctgcagctatcctatcgctttctattgtggaagattcatgacgtatgctgttagtagatgctccgagttcgtcaagcgatatggggaagaaaataactggatctgctttggctaagaacgagctgcatgtgaatagttgtgtaatgtttcaattgtgcggttaggcctttgatggccctctgctttatgtaggcagaccaatagccaaatcttatctcgtacatatagccgacacaatttggccgtgtccagctctctaaacaatctttgctctggtaggtggttataggatcactagtcgttggtccagcaccaccgagtggttgaaccatcgttcatattcaatctggaggccattagccagtagtatatagttaaagtcgtagtgccaagggctgctctgtttagggatcaccgttgaaatcctttcatccccactaatccgttagtccgttaatccgttatagtaatccgtttgaagtctaaccgttcggtggacttcgatagataatacttaacgaaccatcgaccggtcttcacggatattacgtctctaaaacgacttctttccagaggaaatagttagtcgttaaaacgtagctaattagtctcgtatatttatccgcattaaaagaaaaataatagctttcaaaagcaacgaaatgcgcgccgcgataagaaagtaatatcgagaggcgctatctatatatatccgtacctttttcccgtcttaggtatcctataaagaagaggaactgacgaatttcagataatcgacttagccttaatattatacccagctaagttcgcctttagctactagtcgaggatagatacgcctagttagtaatagaatctaagaaattattattacagtcgagcctaagtaataggaccgtcggtctgcttcgagctatatataaagaattgggccggtcgctcgaagtagttatactatagaccttatacgattctgacttagggcgggacgataatctaggggaggatataagatatcctctacctactagatttcccggtactaaataaggatataggaagatataagcgcgtataaggaagaagacgggttatttataataaaaatccgctaactagaaggcgcgaaccgcgagctaggggttaagctcgatagtactcgggcccggctagacgacgcgtatagtaaaagcgatcggttctagaaaaagtctcgtcggcttcgggctgagcttgaagctagcttactccgaaccagtcggctggagactaaattaacgcgtgttagagcgggagtcaccgaggcgataaaggctttacaaagccataggaaccagaatagtagctcgccggcggaagaacgcgatcggaattgatgtcaggaaagatctcgcgaagtggcaccgtaatccttgaggagaggttctggtagactgtgtcaacaaaagagggtcacaattctactagtgcgcccgaggtataattattcagcacccccctctgcctcatcccctatttattctgcactttctatagtatataaaaaagacactctcaagtactcaattggctatacccatactagtctgtactgtaacgaccacgttccgacagactaacttactaacacattggtttgtttatgttctataagcacatgagatgcgaccattcgtagaaattcccacttattttatcgagcctacttatcttaacctcgacaagcaggagtgggtggatcctaggttgaacccctataataggaatctcatattgtttatagtgaaaacgcggctataccctaaccaccacgcgtttttacacatcgataagctactatagataatatataaatctcctaggaaggaccagccgtaaatgagctgcgctagaaatgacaagtatgcgtttggtttctgggcagaaaagtatagagagacgatcatagatatatatatatatatatacttcggattaagagaagggtttcgcccaataacgctaagccgtagggggtgacttaaccaataccttataacccctaaaaaccaagccgaaagaaacctcgtagggaagttacgctagtaactaagttaagcgatattagaaagtatattagaggtctctacgtagacaatcctaatacgtttagatttacggcaaagacagcgatatctacgcgaagggatttcctatacggatactatatacgcgcgaatattatgcgctccttatacgtagccgagaaaattaattttgtggcacgtatctttatttactacgtttactagtatttttaattcccccctagcccctaattgctcgaagaatttgctctacctagttagccgtagtcttgtatgatagatagataggatcacacttactcgtagtagcttattaaccgatagtcggtttagatcctcggggagactctaggccttggggctctattttattcccggagagcttcttattattaagctttagaccacgtcggttagggctattagctttagagttacggcatctatctcggtcgcgtcgatttagtaactatactccgcccccgctatatattcctcgttagtattaccccccgaaggtattcgtaacctagactactccttacttactaattttaacgataccggactctataagaaagatcgtatcggtacttaaggtagctagtactctaccctccctatagagatactttattccttttaggacctactaattattagctattagtttcttaatagtagtaaccctttcctttaggaagaggagggaatagcccgtacgccctatacctactagctaaataattatagcgagggctcctttgtcgatagagtatcgcgaccctagtacctagcctacggataacttaaccgcttcctatactaggaaatcctgacctctataacgataatactcgagtaggttagggaagcttcgataggtaacctagtatatcgtcgctactaacgactcggcggaagagggctcctatttaagccgttagatattaactaactcggccttattacttcggagacgggcgaggaagattagccgcccggagacgggcgaggaagattggccgcccgaagattcgaacgatcgactcgtaggccagctatagatctttattaacttatcggatctttagtaccacgttttaattctttcgctgagtaggagcgggacgagctaagggggatcctacggtagatatttcgggctaggggtcggataggtatagctgtgaacgagaggcctgctcgatttcgagatctaaatcgcgctttcgctttagactaagccatatagtccgtggtcggacgaggtgagtctgattggagtctattttaaaggcgccgtatagagagggttgctagtctagtgagatatacttaggttatagtgcgactactttatactctagcgtctacaaatctaatcccgggcacgtctgcttaagagagaaccgaaataagcgggtatatttgattctccggccgtctaatattattcatacggtcggtagaagtttacgcgactacttgtatagcgatagcaactctttgtgcgggtcgttcaaggcctatcctcgtcatatattgatagaattataatctgcaacccatccaacgacacaaggaatagggagggtataccatacatatggttcgtggacatgaaagaaacagccaaaatgcccctagctcgaacgatgccaatgaatggctataagggcgatatcgctagcacacgctgatcgggataactagtaggatgtacctacatcccggagcagttaactatggccctaggagtagtcaagcttgcgacaatcatttactccgaggaagtcaatgaatctccacggaattaagctataaaattattttcgacgcttattgctctcgttaagactagagctatgacctagcttaatattataggagttctacctagtagcttttagggtacttttgctcaatctaggtattatactctctacgacgctatataacgggtgtcgtcctctcttataaatatactattttctagttcagctctcttttaatatatatcgggactctatctttcaatcggtacttagctagatttttagaaacccttactatctactaatatactagggtattagagacgatagaattaaatatcggaacgacgtactaaagatatctcgtatcaatagtacgatctaattaggcctattccgaggaggccctaatagacttccttataaattagtccttatagatatagtaaaatctatattatatataaaatataggcccgataactcctaagctaagtagtatacctaacaatagatttaagaatagattattaagtttaattaagtagatattactcctataaccccgaatctaaggatctataatatagactaactagttagtatcgtttagctatattatctcccgcagtatctatataacgcgccggattaattcctagaatgccggttacgttagtatttcgaagttagagataaagatattaggataatattatgaaggctaaagaagccctatttaaggctataactaaggtacagctagaatttgtcttttaatacgttagattaggttcttgtatcagaagggctttaaggttatatagttactactaacagtctcctctccctataaaatcgatactatataagtataatattagtagtataacagattatatcatccttactaccctatcgaccctacttaccccttctataacttatatataataaagttactcgagctattacgtagccttatcgatagaatccgctaataagggttatctaccaccccgtatatctattatttaagaagaacagtcaaaaattatatatagtggaacgatctatagtacctaccggattgacctacccgattctaaatactctaagttacccttatcttgattaagattcggagtaggtattatctctagagatagggcagtcgacctccgcgtatagttatattcgaacgctagtctaaggatactagctaccggtatagcttacgatatagttaagataagggctggttcgagtttatcaagtacccgctctaactctcgcgcgagtacacgggcacgggataaatgctttcgatcttttattactacttaagaagggtatactgtatatactatacgcagagaccgaaattatagatttccaggaataaataatagagtagaactagcttcctcttatgcttccttaatcgaagaaataaagtgagttatcatgctatatagtgcggagttccgcgcgcgcccgcaggaaacccaacggctagcatgtaggtaatttttacacgttggctgaccgtcatttaagtataacttagctacccatttctatgggccccgaaatattgcttctcaagccgacgtccaccgtttctgcatcctttctaggctcctagcgcctctgttttctcaaccacgctgttaagtatgaccttaaataactccgagccttaggaaccttcttagataccgtgttcttttagaagatagtctattatagctcctatccgctagctagccttataaataagatcagccaatttacttacttactctagctcgtcggtaacctacgttagggccttccgcgtagtggttaggtcttagtcgagctttccctagattttctctatacgaattacccgcgaattcactacagtaagaatacaaagtatttcctatagaagttaggagagtcttattagagatactttagtaagattgtactgactagagtatctatagcttagctaattaagcttaaggaaaaatgagtgttattaggtaggtcctaaaaccctaatagtcggatgaatcaagtcctatagtctcggtttatctagaggataaacgaattagtatagtaatactaccttagtcgaccacgtaactaaggtattgctggtttgagaacgttagtttctgcgggctagggcggcctttatattgaagaccggatcgctaaacggatccgaaaagaacacgctgttatctctccgtataaggctatagtatatactaagtcgatatggtgaagtggccgtcacggagacacgaggaaaagccacggcgagattatcgatagcgcagatgaccataattctgtttatactaatatatatataagtctatagagcagcgattgttagtttgtcatagcgcacatagttatctctaggcacggatagattactagatatcattttagttctacagtattatatctgcagtgctttctttacccgcgagaccatacctacactcctattaagaattctcaagacggtgggactggaggtaatatatattgtttgttgtccgccactctcgtcaaggcgaccgacggattttccaatcctcctttcctcgagattactagacggtgagtggaatactagaatgtgaattttggctactgacttttactaggatgtcactgtgaccgttgaagatgaacaaagcccgtcagcagcctcacagacctgactcgcaggtcactagcggtggtatactccatgtaagggaaatcgatggtggaatggccctggatggtctacaggacatgaaggatgaccgatttaagaacattgtcaatatagttgaagaagatccgattataagtctgcgtggcacatgcacatatatcgtttaaaaagactgtgatccgttgagatatcaccgcattagatggcaggcctctctgaggtagatctagtagaagtaattcttggacacgatcgaaggtgctggcactttcgttggaggcttcttcaacaaccaccgacttgaacaaccactgacttccacgttccttatcgatgtgctttttgtttaaacgttctcacttgaacgcttgagtttaaacatgcattgtttcaacgtgctttgatttaacgtcctcacttaaccgttctcacttaaacgcttgtggttaaacgtgctgtgtttgtttaaacgttctcacttgaacgcttgtggttaaacgtgctatgtttgtttaaacgttctcacttaaacgcttgtgttcaaacgtgcttaaacgtgtttagtttaaccgttctcacataaacgcttgtgctgaagcgtgctttgtttcaacgtgctttgtttgaccgttctcatttaaccgttctcacataaacgcatgtgttcaaaaatactgtgtttaaacgcttccctcgttctcagctatcctttcgtacaacacgctccgctttttaaacgctgtcgtcatcagcgccttctttcttttcaatctttataagcttctttctcatgcacactaagcgccctcgctttcaacgctactgatttaattgtcctcctcaatccaacgcccattatcgttggaccttcaagataagaccgtttgacacccccgacttcaacaccctggctttaacagattacctatcgctgcctgagtcgccgtaggagaccataggctacttttcaagtttgtccagactcagtatgacgatcttcaacaatttaatcaaccaaaggttacaggacagttcccctcgtctgaatgttgtgggctcagccctcgaaagtaagtcttaaggaagcttcaatctgaacggttcaattcgctaaccagtccgcatttttctaccactttccatctatcatctcaactagagcagtagctgtatacgaagaaaaaaataaaacaacggaaggctctggtcttacagtatgatagccatgcagtctctcctgtctatgcacactgcagaaatggcaaaggagcctatctcactgctgtctcctttgatcggtgagaggcgtcgcattccgagatgccaattccacctccaacttgttgacttgtttctcaaatccccatgctcgtttttcggccgcctgaaggcagtaatcatggtattggatgtaagcatgaagttcttccttctctgctttctccttctgtagcgtatccctgatcttgtcattgatgccaagcaaattgatatactcaccgtatatctgggcgataattgtctccagtctttcttttgaatgttgtatacgttgttgacgggatggagggtgtatcatcttccgtggaatatttggacgattgttggtgggtaaggctggatgggcgcctggtggggggacaatagctgaaaagcgcgatatccttgctctctggggaggcatgttggtgcttgactcggaattgatttgttggaattggaggtttagaggccaaagtgatgtggaatggcataatggtaagggaatcgtagcatttatattccccgatgaaaggagtacacatgacatgacggggcggggtcttgcgcaccatccctgtaagcaacgattcctggaaccaagcaaaggacccctgggctaaacatctgtttctgggagctctaggcttatgtttcggcgtccggtactccgggaagcgctgtgagggacatacacgaagtgcacaggtactgtacaaggattttccgaatttctctattgcaatgaagatttgatcggttcactgtatgtgacatactctctggtttccaggagcctataggcaccgaaaatttgagaaaaagacccatcgcgcgttttaattggaattatggagcgaatcatgcctcctgggagtttgtattcatagatcgccgggcccactggcttcattgacatgagcactatatatgaggctttttttcagatcggacaaaattcgaccattgaccagacggcgacagatagcccggacttgctcgtcaaatgccatctgtatcacgaaaactatggatccgaccaccctattcagaatggaacctccaaccccggagcagaccgaacaccaaagcaaggaaggcatatggacgcgcggactggaccagaatcggcgaggaagtagctcgatagatgagcccatggaggcagatcaagaccaggccaacactcgaccaggtagtggaacaccttacagcggcgacggcctaggcggtcgaccggtttatacccgacaacgccccacactatactccaagcgatggttcacgccagatctaaaggcccagcaagtcgaagtcaatcaactacgtaggaggtagcagaaaaactacgctgagttaggaagaacacacgctgataccacagctaccttctatgcaatacaatagaaacgaagagcgtggataagaactatcgaaaaagccaagtccttgtattagaagcagtttctagacgaagctagtaaagggaagctctagaaggctgcgatatatataaaacctcgagatatataggattgcgtcctagtactacgagtaggctcggaggagtatatctaaaacgaagacaaagcgaaagcattcctagatacgttcttccccgccataagtctacctaagttcaactcgccggttatactaacgacggaactcctatagcacccaatcacagaattagaagttaagcgattactaaaagcagctaaggggaatacagcgcccggagaagataacttaccgatactagtttagaagaagctttagaggcatcttaagacctttattattagtatctttatagtaagtatagagcttaggtactatctgagatagtagaggagcgcgaaaatcatcgttttacgaaaactaggcaagcctaattactctaaacctagtacctaccgcccaatcttactgttaaacacgcttagcaaactcctagaggtagtgatagcccgacagttatcctatctagcagagaaatatagcctactactaaacagctagttcggtagacgaccgggtaggactaccgagtaagctctactagtactatctagtgcgatcgataaagcctagtataagtagactgcggcacgatccacaatatccgcggatatccacaatccatatccgcaaactgcggatatggatattttttgatatccaagatccgcagccttgcggatttggatatggaccttatatccattggatatctgcggatatccaatggatatcaaacaatacaaacatgcctagactcgtgacctcaaggggtgtgcattattattatacattcctatgtatttttcgtgtaatacttggtactcgaggttattgaatattaccaggtaaaccgtaagtataatttctgaccttagtcagaaattatgggtagaaggtcaagtactgttctactcacagtagtatacaattggaatctctgaccatggtcagaaattcagtctatacattttttagggggtttatgaatttaaatcttctaggccctatttactatttatagatctaactggaagccatctggtaaccttggctgttttcgaatccgccctaaacggcctaatatactcccatcgaccagtatctctggaagcttatcatcctctttaacagcctcgtatggttgtttttaaggttgttttccttttacccgtctacattgcttagtactatcatcatccaagttattatcaccgctctcagtatactgggtagcctcgagtctagtctcttaatcctcctccttattatcactgataggctctaagaccttaagctatggtaatgatctccgggtttaatctagtaaagcagctttaccttaggatagatgctctttaataatccctagctcctcttgccgaagattaaagttagtagcaaactgatatagcattaggccacagattgtactcggctttaattgactacaacggtaataatagatatcataagcacagttaaatagtcgtttaataccagtactactagcagggatagatagaatgtcccttactatcctagctagggtcgggaagctcttcttatattccttccagaaaagtcgaggtttctatcactcaattctataagtaagatatcatgtaatctcgtcgttatctggttttacaagctcttctaatagctggttctgggatatataagcagtattaagatcacagtcattattcttattaatagctactccagaagtctccagtactactgggtcattggtattataggtaagtatcttcctatatcgatcaaactcttggcttaggacctcttgataataatttatataatcaatattaccctactaatcagtcgaggaaaagtaccagagtttctttaatagagagaagattgttactagagtatagatattactataaggcttatagtcggtagcagtgtagtacttagagagctttttctttactatttagagtgcccgtaatatccatttcttctagattatacctttattcttaagctttaccttagctgtatcgagataggagaaaagcttattatagatactatagatattatatatagtaatatcctttatctttgatagcattattataaaatcaaagaagggctttattagaagaagaagatactcgacttaacaccactcttctagattaagcttaaaataaagatattaatgattagtataatactaatcatagaatggctggagcttcttagcctagttgagtattaaaaatgttaaattctattatatccaaatatcttggattagaatcaatgtaggctctggctaaagggctataaatgcctcctgacgttgtgggcttatattaataaagactactagtccttagatcttctatacttttattagtctagctattataaggatctaggggtagaagatataccttttttaatatatctatgatctggataccgctagaggtattacacttattctagaaggagtgggttttttcctcagaccactctaactcaatctctttattacttggcactgccttaagcttcctaagaagcttatttagactcagctggattatatgcgcgatatatgggacacagaagattaagatatctgatgaatactaagactaaaggtggtcctagatactctgtatcaaagtattattattagttgcgttatctatagtcactaataggatataatccgagataccatactctgttaggatctaggtcatagttttactaagattttcaccagtataggagccatagagaggctcaaagcctagaagaaccttatagtaatcccagttataatcaataaagtaaccagtgatagttataaaggcctactagaaaggagaagtccagtaatctaaggctattgatagccgatacccctctagaagtctctatagaatccccttctagttattctggattattatatcgagataacatcgaatggtttatactaatggaattgtaagtttagtagataattgttaagcaacctctaattctatgatctggatactgctggaggtattgcgcttattctagaaggaataggttttttccttagaccactctaactcgatctctttattgcttagtactgccttaagcttcctaagaagctcatttagactcagctagattatatgcgcgatatataggatatagaagattgagatatctaataaatgctaagactgaaggtagtcctagatactctatattaaagtattattattagttgcgttatctgtagtcactaataggacacgatctaagataccatactctattaggatctaggtcacagttttactaagatttttaccagtataggagccatagagaggctcaaagcctagaagaaccttatagtaatcctagttataattaataaagtaactaatgatagctataaaggcctgctagaaaggagaagtctagtaatctaaggctattaatagccgatacccctctagaagtctctgtagaatccccttctagttattctagattattatatcgagataatatcaaatggtttatactaatggaattgtaagtttagtggataattgttaagcaacctctaatatatagtggaattaggggtattcgatcactcaaaagggcagatatatagtcgaaataaatcttagaatagtattagagagatggtcttaggtaaatgatatactagtaatacctggctagattaaagtactcaatattagctgctaaattataaagaacttaactactatagtaatgccagttaagtgccctagttaatataccattcttttaagaagctagtcgattcttaggccacttttttttaaatatactccagttttaaggtatgctattataggcgaagaactagtacgccggaatcttagatggctaatcatacagagatataccttatatataaccttcggctttccatttttatcatttataacctagtagaagctatcctagatatccaatttgctttttaattcctatcgaattgtattcctaatattagactaagatctatacttagttataagctactaactaacgaatttattgcataagtcctccatatcattatatatagaatcagatagatataaaacccagtgcttttgaaggggaggtctaacgcaagtaagggataagggcataagggttaaataagttaaataagtcagcgatatcgataggactagtatttagatacctaaaaaatcggagaagttattagggtaaatccaattagaagctaaatccatatctaaattagtgaataagaactgtgattaagatattaagaagttaataattataatatatagtatagtagggtgcttaaaagaatagagaggcttatatctgaagtagtagaggtttttaggggtaaagtaagcgtactaggatattctaacttagacttacttttgatatggtttacctaaatgattggctgtattatatattagtacggataattggaggatatcctatagattttgaggatatcttaaggatattgaggatatcttatagatattttgtggatattttgtggatatccataagatatccgtaagacctcgaaactcataaagtccgtatttcaagaacttctatctcggatttctcaagttctagtagtcagaataaattgaaaaaataatcagtagatagctaggactctcggcttttatttaagcctaaggttgaaataattcatctaataataaaggttttgattttctatgttctgtttcttacgaagtttattattgttaacagtagttaaatatatatttctatatataacttataacaaaatcgttaatctacggctatctttataataaaacgtcggactaagaaaactacgatactacctacaaatactgtataaggagaccttcgatacatatctatttcctaaaatttcaaagtgccgaccgtcgatttaaggggttggttctgtcaggactaaacatgcgtttatttcagtggtaaggaaatattggtaagctgcattaagatcatgtgataggctataagggggaaagtaagcgagagttatgctagtgcggatatggatatgaactcatatccgcagtgcggatgtggatatcaactcatatccaatatccgcaaattgcggatataaggatcgatctgatatccattggagcggatatgccgcagtctaagtataagtataaggtagtgaccctaatcgccttcgaccttaaaggtacttttaacggagtcaataagatcagcctagatacgtcgctataggtaagacggatcccgcttatagccagaaaatggattataagctttataagcgaccggcacgctaatatcgggtttgacgacttccgtacggagactactccgctagtgaactctaggctagcttaaggattactactttccgctatcttatttatattctttaataccgacctcgtagatcagcccgtcgactcctagggaggtatatcggcattcatcgacgattacttccgatagagagtagggggctcagtagaagagaatttgactaagatacaatccgaggatatccctcgtatcgaagagtaggcgcggagaacaggatcctgcttcatagcggagaaacccgaacttatctatctcactagaaaaaggggagaatatatagaaggacgaatcatctttaataggaccgacgtcaagccatcgcctacagctaaattactaggctatcaagcgcgccaccaaaacggcaatcgctttaagtggactacgacacttgcgcctagagcagatgcgacagctctaccaggcatatatcgcgcctatagtagactacgtatcgacggtctagcatgacccgcttagggacaaagttcatatccgatacttaaatatagttcagagaaccgtattgattagaatcctatcggcgtttaggacggtagcgaccgcgacccttaaggtagaagcctatatacttcccacataccttcgccttcgctaccgcgcgtagcgtacgattacgagactacatactctaccccgcgactatcccatttagagtgctctgttaagagcctagaaccgtaggaacaatatcggatcatacgcctacttcctattagtagaagcgctaaagactatggacgttggtaggcttaacgaactagagataatcgacttacgcccgctaccaccgtagcgaaaggacgcctttatagagattgagctagaacccgaccgagagatagcgagagaaagagcggcgtccgtaaaggacacgttatagtcgtctactcggatacctccgggcgcgagggtcatctaggagccgctatcgtcgcccttaacgataataataaagtgacggaatcttaacgggtataagtagggtcgatagaacggtggtctatttatatagcggaacttataggcatcttctacgcggtcagcacggtatttaagttagcctactaacgggtaagcgtcggagactatatatatacaatagcaataatcctttataatagtagatccgctttataagcaatccagaacgtaagaaatagatcagggtaacaaatcatctatacaatcctctaagcagctactgaggttcaagtagggtatatttccctccgtctctagtagatactaagatactataaaatcgccgggaacgaggccgcggatcgactcgctaaagaagcagcgcaaccgggtaaaacctatccttttcggccgctactaacgagagagaacgcctttctctatagtaggatctatacttagtaggagtaggagtagaaatcaagtaccaaaggcgcgtacctacggaaagtagacggcgcgctaccagcgaggtatactaggaaaatatacggaagcttgcctaggaaccgagtatacctactcactcagctacgcacgggccacaactagttatccacgtacgctaagaaatttggtttccgggtgcggcgtataggagacggtcagccacgtattgctagaatatccaaaactacgagagttacggatagaattaagaagaagtgttagggacgcgttgaacagcgtgtcgagtctgctgggaggctcatcccgcatatcgttcgcgaagttgggatctaaaccataacccactaggctgggtacggattcgtattttggtctagttgggaattcaactcgcgaggggacagggtaaatgaatcctactactactactactgtctgtattatcgagaccagtctgcgtcaatctaacgacctctagcaaacaagtctcttactgtacaaagacatacataattactctatacagtatgaatggatgatttcatttagcctgactcctagcttttatttgattataggccactatccactagacttggtacgcatttatatttaatctagttggtgagccagttcttttggcgatatacgtgatcggattgtccgtgaaggctcacgtatgtcaatgtttatgaggacctttcggttgtctccgaaagtgtacttgtttgcttgactcctgtaatgtaaaacgctggaaagatatcaattatgatgaaattggatggaagaggaacgacggagtctcgatatttagagcaacagataagaagattatggaagttcattctggccccttggctgagccttttgaccaatgccccttcagcgtgttttcggtgctttaatgaaccagttttagtttgcggatttaaaacgaggtggggaaggtatttcaaagcaaaaaacttacgatcaataagagaagaaggaacgaatagcggcgttgacacataggtcggttacttcactcggaataacatcctcgtaaggagggttgcagttgcagctcgtgctcaatgtaatgttgttgccactgtcggtagagaccttaaccgattccgtgccggttcccagagtctggcacccggcttcgaagcctccaacctcttttcccgcgcctgaacaatcaattgtggagtagtaagtaactgaccacagagcagatgctgaagtggctagtctaagtacgaaaggggtttcgaaacgcatgatttcgatgtttaggtgaaattaatgtatgatatgcataaaccaaattgagagtcagaatacggtagaaattcccttgttatatctccttccaaggcggagttgcaccttcacaggcaatacaatggggtctacggggctaaaacgcggccgagctctcccaaccactctctccatacgtagctcctgtgctttggtccacggctcagtgggagtagcaaccttacgtacataccaccggagcctaggtcttttcacacagcaatctctagaggtgcttgcatctttcaccacactcgagcttcgaggaacgccgtcagaagcacgtcgtcaatttaacgcggttaaccccatcggccccaacgcactctaggctcggttgaacgttcatgtgcgcatgcgtggacattttagtgattataaacatcctcattagaggaaatccatcagctcagctattctgggggatgttgaaaatccatgtttatgcaccccctgtttacccttccacgagtttttgacacaaagtgaattggtggtggtatttttacgaagaccaggagccatggtatactctgacactatacgaggcacccttcttagagagctgtgtgtcatcgggattttgtgtatattttgaaatcatgtggaagcttgggccgattcctgacgttgaggctgtgcaaaacgtttataaagccggtcaaaatttaactaactgtgttggttggatggcacggtgtgtgaatgaataagatggttggaatggcgacactaatcgctgtaatggccatgattaaatcgcagcttttaagacaagcctgtgactgttgcgttcttgacctgtatcaattgcatcttttgcacgctcaaacctcccatcatcactttactttgaacaacgggatctttcaaatcaactaaggcgtgtatgttagattttcgtagataccaaaagcaggtgatatttcaaatcagtcttgttgagtgttgagatcagctagtcaaaagtcgtttgttctgcggttttcttggaggattggtattgtgcccacaaaccaagaaaagcggtctaacgtgctgaattctaaatgcctggctacacgaagcctcttgaaacgtcgtatgatacggtattgagcccaatgtgtacattaccttacttctgcggttagtttctttgctcttacgtaatcgtggctgtggcgatgcaaaattgtatcgatctgtaaaatgtatcgtaagttatattcggtttgctgtattggggtttccacaaatatccaagtgcaattgcatacagtgtcatttctccttttaattggtatcatctctgaggaattctgggcatactgtagacccctagttcatgtcatgacttttctgatcgaagggtttgggcttgttggagggggagatggtcgactagagagcaagaaaaggacaacctagaatgtctttactccgcgggcgtttcaattgggtagaatctgaaaaaaggtgctaaaccccatgcattatactgccacttgatcatcttctacgccctggtttgtagagaaattatcggatgtacattgtgaatagaacagaaaaggtatatgaagcaattatgctatggcgccatttcccagtaaagcatactcgaaggcttttttttcttcgatcccgagaaaacctagaaacccgcctgaatacgttgggcttctgtaaagtagcgaacatggtggacatcttccgcatggcgtttgagcgctttatgtccactcaacacaagctggcaatatctgtcaggacaggttatgagctcagttggcttgtatttccgaagatgcttttcgaaatgttctcgagcttttcgggatgaggcaaagtagcactggtactgcggttcaaaaatgcagaaaaggcaatgtcgattggtgagcgagatgggacagcctcggggttctggtgatgaagaggactctgtttccgccgaaggcagttcttttggtagcgaaactatgttgctgccgatggcatattcggtttgtctctcagggttaaatctttcgggtggtactttccgaacacggccaagctcaatcagagcattgaccagagtgactcgctgtgccatatcatttttctctgaaagatcttgcatggatatttgcatcaattccgctacctgacgacgctcatccaaacgatgaacgatcttctcgggcgcataagcctgcttgtcaatatccaaaagcgagggatcgagctgtctgttgatctcaagagtatcgatcgtggaaaagaattcaccacgagctccttcaaatgtgtctttcttcaattttgccttggcacatcgcaatgcagcttccgtcttggctttgagctctccaattttggtgccagccgcgttcttcatagatccatacatctctttggcttctttggcaagagaatcgcgcatttcttacaggccaactatctcagggtgagttgaaagtgaagctcgcgtagtggcaggcaaatcgtcgtaatgagaaggagctcgagggtcgatatagcggctttggtgactcagaatgttcatcaatgcgtcctccgaaggtatcccaagaaatgcggcttgaacatgggactggacacgctgattcatatatatctgaaaggtgctagcatatacatggcccatcacctgttggagcaaaggaagaggtgcagtttctgaacagagtgcctgcgtcagctttggaagtacaatttatgttgtatgggaacttactttcaacagcctcaccggtgccacgccggagatcgtaaggtttcatagcacggggcatgcccactgcgagactcaacctttcaagataatatagatacgtgtggtatttgaggggtttgatctcatgggtgctgataccacaatgggtcgatattggctgacggcagataggcaaattgagcttttctttcacaaacctcaactgcaaggagtggcgcggcgattctacccgggaggcaaaaatgtcctcgatcgagcgaattttgctctcgaacgctccatcgaggaaggccatagcgaccacaagcatggcaatgtcaaagaatggctgtttcacttcagacattaagaatattttccttcaccatgcgatcagcctcgcataggaaaggcagggtacctaatggatcttcactcacttttttggtcttttatcatggcccttggtatgttttaaatcaacttccatcacgagatgatcacggataccaccaggattcggtagaagtatcaggcttatctggccgtagcaaagtgtttttagatcctcgtctctgagatcccattcatccattttatcggtttcagtagcgtcaacctcactcacacttccaaagaagcgctggacattagtctgctcgttcttttcaacatacaccaatgcccccggtcggcttgcagtataagccgacacgagtaagacgaaagcgagctggatgatttgccggccgtccggatatggcgtagtatctttcgtccagtggtaatgaagcacaatgtacaaatcatcgacgttcatgacgggcttttcctcaacagacctatccagattgaaacgttcaactaggtctttgttcatgtactatcacccttctgtcagaaaataaaaagagcagagagcaagaaaaacccacatcattgatatcctggcagcttttcgcgtggaggctacgccccaccgctttgcgatagagctggcaccataaccgccagttctcgtgcaggctgctgaacttttttattttagagttgtgcagtatccactcaagaaatatcatcacatcctctttccttgctgcgtggagagacttcaagtactcctttttccctagaaagtcacaatgcctgggctttgatcagcgcgatattccgggatatgataagaaaagacgcctacttaatccatcttctcttgatgtattcaatgttgttcttcgtggatacagcatgtcgcttttgaattatgctcttctctagttgtcggcggcgctgaacataatactccgggctaggtactatctttgccttcatgcgggaagcgtaagagtctgaaacagtcatggcttcaggtagcaataagcctagcagatgccagagaatagtggcaggcttcaggaaactgaatgggaaagaagctggttggtatggcgataatgacagttgcccagaaggaaggttggagagatacaatgtagaaaagactgttgctggtgagttggactgtagaaaggctacgagatgatggggagggggggcgaccatttaaatattgagaaccggtcttgatggctccgcaagacagacgatttatcatctttgtctggagcggctacaaacggactgaaggatactgagcatcacgtcatcactgatcaattgccctgagcatactgagcgaagggtgagcagatcactgagcagccctgagcatactgagtgaagggtgagcagatcactgagcagccctgagtgctcagtgatcaaaagtacattatgcacacgtgatgttatgatgactaagattttggtaaaaagggagcttaaaccggcgtccaaggtagccatttacggcagccgatttaccgtcaattagcgttgtggtgtaatcaattatcgggtaagatttatggtagatttcagcggtacggggcccaagtcacattatgttgagggcctactgtgtggcacaagcgagaagagggagagagttaagattcatacgtagggctgtatctactacgaggtgaggcttcttgaaaagacactcggaagtatcaggaactaaattgtaaagctgcctagtctccccattcatgtgatataatacaacgcacattgtgtgcatagaaatgcgtaagcgatatcaaattacattagcagcgctcatcatgcatccgtaggctgttgctattcttggctagcgttgaataaccctagctataatgttaattacttactaggattctcaacaaatagtaagccctacattctggggtccctatggtccagttactttttcaaggcatatacagaaaggcagggattgcaactttgaccataaccgccgattttaaacttatcattgcatgcctagaaaaggcaccatttccgataatctttttttttcaagactttattgtgagtattattccgtttatctgtgtcatacgatataagacattggattttatataaaccagtctgccaaatccacggttaaaactctcccagcttacaatcacaaaatggcatcccaggatggattaccctcgaaccaggccggcatcatacaacatgaaggtggtgttcttcgaatcactcatggtctgcctatcccagaacttggcccccaccaaatgctggtgaagactgctgccgtggccctcaacccctgtgattttaaaatgccactgaggttcccgaccccaggtctctgggatgggtgtgacttttcaggcaccgtggtcgcactaggaagcgaggttgctgcacagggacgattccgtcttggagaccaagcttttggtgctgttcaaggctccaatatgtcagatcccatgtctggagcctattgcgaatacattagaaccgagccggatctgactttccatgttcccaaaggaatggaccttgtcaacgcaacctctctctcggggactggaattgcaactcttggggttgctcttttctggtcacttcagttgcctggaacattgactacaccagcatccaaacccgaggatgttctggtatacggcgggagtagcactataggactacttgcaatccagatggtgaagctgtaagtatccccttccttcccataactttctgtatatttggataactgattcatcttgcttagctgtggccaccgggtaattaccacatgttcccctcataaccgcgacttggtgacatcatacggggcagatcttgtctttgattacaactctccaacgtgtgccgaagacattcgagcggctacaaagaacaccttgcgctatgttcttgatccctttgcggaagcaaagactctgcggatgtgccatgcatccattggtcgtaccggaggaaggtactgtgcacttgagcaataccaagaaggcctttgtttgcgaaagacaatcaagcacgagctagtcatgggaggtgccatctccggacgaggtgtcgagctaccagacccatatggcattccaccacgacctgagattggagtctgggctcggtcatggtacctagagctccaaaaattgatagacggtgggaagcttaggccctgtccaactcaaatcattgcaggcgaatttgaagggatcttgaagggcttggacatactgcgaaatggaagggtctcggggaagaagctcgtcgtccctatgatcaccaaataaaacgttgtattgatgtggaggaaggaagtcagaatagcgcgatcgcgaattatttgagaaaatatacattttgatgtacggttggaatcccatgccagcttgtacacacgagactgctcatctctagattatcgtcatagtctagctttgaactgatttacacatcagatattgatctctttggttttcctttgagttaaatctcctgactggtgtgatgggctttggacgtacggagtagagagctcgatattatcggctactcgagtagaaaaagtgtcatcctatgagagtcgaaaagatcgcttaaccaagtaactctagaaggaagttaaattaaggatatgaggtacattcattcgatatgcgttggaaatacggaattatcgacgtaggtggtaggttaggggtctaatttggaccatcgtaaaccatcttagcaatgactttcttttcctccttggtcgtgctaatgtttcgtgtcaaatgtctccttccgtccagctcttcaaatccccaaatcacttctgcttcccatccctttgacgtattccgggccaattcttgaatgaccttgtcagtcaagctggccgtctccagaatttgacggatggagtcatccagtatgccagatttgtcgataaatttgagctgcatctgaatatctccaaagatgggcagtgaaatgtcttgcttgcttccatcaaccgaataactcccttcgctgtcaaagccgcctgggttgacagtttgtgtcatacgaagagtcgtgaatggtttcaaattgccggacaaatcagaacttccattagagtttcctcccgtgtgtgtgctttgtttggcggataggggagtggtctggtggatttgcagcgaaagccgggcgtatttcaacacctttcggacagcccaaggtacgccttgctattctttcttagtatagcgaaccaacatctcagttcagtattactcttaccaagataaagacgtcatctggatcggttgacagctttcggttctaatcatcatattagcccatccgttaggcaaatatcaaatggagaaaacgtaccaataaccaggttccagtaagatcaggaacatctttggaatcaggtatagccatcctcagggtttcagatttagcaagtaagttgggaatagttctttccttattttattttcgaaatgtatcactctggtaatgaggcgagtcgttccttttaatagtgaagttgaatattctctactccatcccagggattgctacatggatgattctaaaacaacatcggactcggactcggtgtccgaacagggaatatcgagtgcaaatatccattcatgcacagactgcggtcgcccatcaataaaattcttatgggttgaagagatcgaacgcagcgtggcttctgtacctggttgcttactcaggggtaaccctacaacaccctttattcaccgagtttgtgataaccatgagcgtgaggacacactctccaactctatctgagagttccttcatctcatctctagatgtgttttcaattttctttttgattaccctacataaactgccaggtcctaaaagtcaacacaatcaaggagtaagtagatattttagaataccgaccaggatcataaacgataatattaaataatcactggttctttaacaagctgccgcaagcactccattatttccattaaagacatttcacaaggatcttgttcttgtgctatgacaatgtcgcggattgaatttgaccaatctttctgacggattgtctcagatcgatcgaactctcgatcttcttgggattggcttgggcctgaccgaaatttaagggctcggtcaagtttacccagcattgtagagctgaattcaaccagtacttgaacttgggcaatgagattcccatccaaatgaaactgcccaaagtgtaccttcggtaacaacagaatcgtggctgcatcagttggaggaatgatgagaaatagctggtacaacctcatgaacacagcacggtatatgtgaacaagtgagcaatgtgcctccaatattccaagccacagtgctatatcgaatttcgggattgcacgagttgtcgcttgatccggagatgtcgttgtggtatgatacccagaatcatgtggagatactgtggtgacatcttcatccaagccatttccgccattttccgagaagataaacaaagagtcttcatatccgctgctctctgtttcaaatcgctgtgtagcaaacgcaacatccaaagtctcctctgtcataccacacgaagatcgaacaattgccaaaagccaagaggagtgatcaagcagacgatatatcggaaggtcgagggtttcaattggcaaattagaattttcatagaaaagggatgaagattccagaagcatcgacccagtctcaaatatctccaaatcctcaagaagttccaccttcaatctcaacagactcttacgaatgtcttgtatggaaaggagagcgccttggcttgttgtatttgcgggcggcttccttatagtttggtgattcacccatgcaggatctggaaattccttcattgcaaagggcgattcgttctcaccatggttgagacgtttggtttggaagggctcgtaaattgccatctcagtggcttgcctggcacctagtggagcatcactagtgaagactgagggaagccaagaattcccctcataagcgtacatttcatctgatgggatccaatcagaagactatagtaattagtagtcagtaaatgattactgttgttttcctcgggctccaacttactaggttataaccatcggtcgatgaatttgaatggggatcaccccaatgctcaacgggagccatgatgtttccaaagtctaggggcatattaaacccaacctccaccgagggcgaatggaagctgcctccaggaaagcctggcattgacgctactcctccccagttctggtgctctttcgtgttgtatctccctgggattggagagggagaatgcagtaacttcttcactctagggccggatgatttgtgaagcacagacattgattgatgccgttggttgaatctttggctctcacggtcctctcgcgcaactatattatgaccatagtttgagggtaatatgaccggcgcaggctggttcatacttgtgatacatatttcttgggccttaagacatcgttcacaagacatgccattcatatgatcgcgctcgcatcgcagcttttgcccgcgacaacgatcacaagcggaccgtcgagagtgccgataattgtggattgaatgcattgtaaagaaaaaaagagaaacgagaaataacgttccctatggtagccaacgagataccattcatgggaagctaccaagcgcaaatatgtacttcgttcttgccccactgaaattggatgcaatacaactgtcaattggtttgaatcattctcatcagcacatgtagaaagacttcaggctcaaggaaagacagttctattcgaaatcagatcctaggaaaaaggccaggagaaaggctagaaaagcgcgtggtttggtatcaccacgcctgtacacctctctattggaacatgatccacatcatgcttgaacatgaccttattcgttggatactcaatttttccacgcccaatcctaaagtgtgacaaattctcagctcatagcaacttagccctctcacaacatgtgtatagacatgcgtacatgcagacagaagtttaagggtatttttatcgcatccatgaactgaaggctgaactccagagtcccagtacgaggtgcgtcaggctttatggaagatgttacaccatgctcaaatgagaacaatgtatgagagagcagatctgctgtgatacaacatggaggtggataatgtttcacatagatactaccactccgttttatgggttggaggccggcttgacgccatagagcctaatcattatcaatgaaacatagactaccataaaataactaatacccaataaagagtagataagttcgatttggaagatcgtagttcacgttgagcccagaccacatcgacattcggagaattaagggcccagctcataatctgcttgacggttctgggcccctgatattttcttttccccccctctgctagatttcatattctccctccacatccttaagtccaccgattagtagtattccagtatcaactgtcgaggggcaaaaaatgcaaagtaaggggttgaaagcctgactatgctcctggccagagcgcggctggctttcaaacactagcaatgtcgacggattataggataccaaaaggaatattaggtataattcgaggacacacatatccacttcctttttttattactgccgtgtagaaccccgtgcgctttatctttgatgtcaaccctctaggtattcatttacattgaggctgcgagccgcttatatcctggatttgcgcctaatatatccgccagaccagcctcagatgggaaagatccactataacaacttgaaattttgtcgtaacttctctagttgtaataagccacttcttcatggaactcggttataatcagacaagtattcatcgatagaaaacaaagtcgaagagccttcatagggagtttgccttctgcccagtgtgtccattccactcctttatcacaacgcgaactccccgacttccttttcgcgggtgaccattgaacatgtctcgtacgattcgaacgtcatctactgtagtctcgtagagctccatctcaaattctcggaaaatggtggcgattgctagaagaatctccgcccgcgcgaggctggttaacagatgctagttagtacacgatttaaacagaacaatcaaggaaaatccacatacggaattccaatacactgtctggagcccttgctaaaagcaaccagatacttctcgaggcttttcctctgctctgggtccatccatcgctctgggatgaagctttgagagtttgggaagatatcttcattatggtgcataaatatgctggtcatccccaccggtgtctgatgtatattgtcaaaaagaggcctagatgaccgcaaaataggggaagcagatatcgtaccccgggaggaatgatccagtccttgtaagtcataacttgatttggagagctgcgctgaagccttgttgccacggcattggtgattcttcatggaggtcaaataagaaaacgataaggatttgccaggggagtcaagaaacagaagtcttcataccttaggccctccagcataacagatgtctattatattatcagatattttggcatttcatgaatcgagtttgcgagcaaacaacttacaaggtacggcattgcctcgtattccaccaaagttgcggttccattggggtcgagtcggttgagctcgtcccgtagcctttgtagcttgtctgggttgttaagtagatggaaggtgagtgttgtcagattcttggcagttgtttcccctccagcggagatgacggtgaaaacctcttgactcaggcggccaggcgccttctcctctgggggaagcttgctgtctagcaatgcatgaaacaatgtgcctttcggcacactaaccttatcatctgtcaagtttgcaccggcggtctggctagcaatgatcgattccgcgagtcgcagactttccagtttctggtcaattaccgggccgatgtgagggttgatacttacaactagccaccgtggaaaaagctcaaacaagccgaatacccagcgaaactgtttgaattgaaccccgacttccacaattgcctcgattgtctttgaccactgtggtgtaaaatcagggtcgtctaaataatgaaacgattcacccatggaatactccacgaccacgtctgtcgtgtaggcattaaatgcatgataaacatgtagcggtgtctgtctctccttccagtttcgcattcctttgcgcagcttatctatcattttccggagcatgggctccaattgtcgaattcgctgctgagaaaagaatgggttcatgggttgccgacgtatccgatggtggcggtgatcgactgagccgaaagctgaggccggtgccccaaacatgccagtcaaatgtaaggatttgtttctcggtttgtctcgagagtataagatttcatagtactctgggtcgtcgatatgaagttcaaaggggctgattctcacaatcgggccgtatttgcgatgcatctcagcgattcgaaaagtgtactggcccccgaggaatgaatcgtaatagaactcataccacattgtcagagcggccaattttggtccggggaaatgggcgagtggtgaaaaccatagccgatatgttgccaaccacaccccataggtcattgcaagcacccccagggccaggatgggctgtgcgacaatggcattccaccaatccatggtattttgatttggagagaaagaagagactcgtagacgaggaaagacgcaaaccctgaccttccagttcggggtgtcttcttgaattgttgccccacacctgtcaagacagacattatgccactaggtcagataatggatacaaaacggtgattggaatccgtcctgttggtaacttcgagcgtcgtatctttgtggatagggaaggatccaacctatcgcggcacatccgtaccaacagaaatagctaatcatatggatattagttccactatgggtctgaagaatgtgtccagagcttaggatcatccatttcactccttctaagaggtccggatttatgacatccaagccccgtccaagggcacggggccgcgccctcggcggaaccttcaggatctggacaaagcgttaaaactgccgacagctgaagaatcataatcgtaacgatgaatcatgatgtacgacgattaaagaattgttgtcgctttcatttttttactcctcattgtactccatgcattccctttgtcttcaaatggatgtgacagatctgtaggttcatgtgggaatattcgaaatgcctcatagacaatgcgattgttcgaaattgcatgaaacaggagacacaataattcttaggtatttttatcattcgatgcgatagggctaccgtaatatcacaggccgatcgaaccttgaagatgacttggcttggacacggcacagtcccaacaaagacggcctaggagaccgtaaaataaggggttttcacacaaatcgatttatattgtcgtataattccatacagagtacggagttcatgtgcataaatcagcagatttgctccggccaataatatgtacctcgtattctttgaacatcctgcacatcctttcatttggcaagccaccacgactcatcctgcagagtggggaggtgcggagctcccgcacttccgaatttgtctaacattaaggggtttcatgacttttgcttcaaagtccaaagtacttggtagaaatatggaaacttcctatgcagactaaattggagagacaaattgtatacaactatcggtaatatcatcgaaatggatttcgacctccgagcagaccttgaaaaatcagcaatcgcagctaaggcgcgtaccctaagaaaactctggctgttagtcaggctactcagttcccgttgagttgatggcacaggtggagatgttgagactgtatatattaaagacaagctgggaaatggatcgtatcgtggcggagtacctgttgtccaaatcccagcgcccgcgtgggttgagatgagcatcgtgccatgtgtactccgtaacttctaggtaaatcgataacgctgtcaagctgccgacacgagcaatccgggtacgtcctggttgttaagacattgctgaccgatcagattcacggagatgatggatattctcgtcattacccctttgaacatgtcgttcacagaggagattcaaatgcggaggattggagcataaattttcggatttgctggcccaaagaaaaatgagatggaacgtgctgagcgtttggaggccaaaatctgatttgacctcccctgaaccaggtacttcggttcgggaccaggccattctgacagaagtacagccgaatctgcatcgacacaggagataggagtacgtagttacccgtaggtaataatagcaaagtactaggtatgacacatttcagaagatctctcgcatcattttgtgtaaatatatgaatgcgcgttgtacggagttcggagtagtcaccttgtgtactttttgtggccggaaatgccaggccggaaagccacgtggtctttatccttgttgccttgttgcctggtttctagagcttcaaatttttttgttcatctaccgaggtcttcccgtacaagacaagtgcatacaacatacggagtacaacatacaacactattgtgtccacgtgtgggtgctatttagttgaaatagtggcctataccaccgaagccgtttggaacatatggatagtgcaggtgcactcacacaggtaatataagtcttcatgtccatatcttcttcttgggaatgaatcccaaagattttcaatgtgaacttcgttattaagtagttcctaaagacctatacctctctttggctgttatttgcctttatgtctatgtatgtatctccgaaatatcggtacttccactacaggtaccatttacaatgtcttgccttcctttccgggtggttcggtgcatctgttacctaaaagatttaagaatttttacctctttactccacccatggatctcttcaaggaaccccaccgagttcgttcaagcctctgcagaatattttcaactctcgacaatcgtgaaacggcataccggtgaccttagtgacggtcatcttgttcagatcccatttccaatcggatacaccctgtggcggccctgtgatgtccgacatggtgtctcacgatgcttccgcggcacatgataccaaaacatctgcaaatgtgatctctgtagagtcggacaatgtttttcgagacaccaaagagtctgatgccgagcaaaatcacgcggacacctccaactctggggaactcaagcgcaggctgaaaagcaggcatttacagatgattgcaattggtaagtcttgattttcttggtcaagatgggttatcgcagatgctaactggcttcggtcgcaggtggaactattggcacaggtatactatcttgccctcaggtcctcggctagcaaatccagaagtctgacctatccaggactctttatttccagtggtactgccatcgcagaatccggccccgcgggcgcgttgatcgcctatatatttgtcggctccattgtctattctgtcatgagctcgttgggcgaagttgcaacctatattccaatgcccggtgccttcacatcctatgcagcccggttgatcgacccaagtctcggattttccatgggttggatctattggttcaactgggcctccacatttgctgtcgaactaaccgccaccggtactatcatccaatattgggatccaagcctaaacattgctattttcatcggagtgttttgggtgttcatcacggctatgaacttcctccctgtcaatttctacggcgaagtggagttctggttctcaactatcaaagtggccactgttgtcggcttcatcatttttgccatttgcatcgatgtcggagttggggagcagggctatctgggctttcgctactggagcacgccaggggcttttgccacgtatagtccccatctaccggtatctgtaggcaagttcgttggcttctgggcggtgctcatccaagccggattctcttatcaaggcacggagcttgtcggtgtggcggctggagaaaccgaaaacccacaaaagacggtcccatcagctatccgcaagacgtttgttcgaattcttctcttctttgtcttgacgattttcttcatcgggctcgtggtcccctatgacaacggccgcctcaccacggcgaccaccaacgcatcatcctcgcctatggttattgcagctgatttggcaggagtcaaagttcttccaagcttgatcaatgctgtgctcttgtccgtggtcttatcggccgcaaactccaatgtgtatagcggcagtcgagtcctcactggattagcacatgaagggtttgccccagcctgtttcggttgggtaaccaagcacggtgttccgtatattagcgtgacattcaccgctttgtttggcttgttaggtttcatgaacgtttccaatgacgcagggcaagtttttacctggctggtgaatctttctagtgttgcgggctttgtgacttgggcctccatcaatgcgtgtcatatctcgttcatgcgggtattggcaacccgcgggatttctcgcgatacgcttccatataaggccgtcttgcaaccatatctcgcttggtatggtttgtttttcaatgttcttatcgccctcacccagggtttcacttctttcatcccacatttccgggtgaccgacttctttgttgcctacatttgccccatcgtctttgtcgtgctctatattggacacaaggtgattttccgtccgtcatttgtccgtgccgccgatgccgatatcgacactggccgcttgcactatcaaaagcaaatcgatcctcccatgccatggtactggagggcctggggctggttcacaaattaatacagcatagtcatccataagaacttttatatatgatttgttttgacatgtaggcatccatagatggatatttgcagtgaccctacgtaacaatgatttttcatacatccatgagccattcttggaatcatgtatttatcatgcgttgtgctcttaccaataatcatctagaaggacacctagccccagattctgtaaaacaccctcgaatctccacatgaccggctcacaaagcatcgttgtatgttgccgcggtttttatatccactttaagtgccgggccaccacagataatccgcctatcaatgcagttgcgccggtgcaaacaacgagtgtcccgtagccagtgccatatgcacccaacgcatgtcctcgccagttgtctgccttgagcagagcctcacttagggggccacttgccacattgccaattccacgccctgtttccatgaatgggaaaatgacagtcgcgtctgccaatggattggccttctgcacctcgttggagacacccgcccatgtggaggaaaagccacccgcgagaagaccataggcgatacaaaagacgtataaagggggaatagtggcagcaaacccccaaacaaaaaagactgcgataacggtaccgacagtcgacatcaaaatgcaggtagtgatgtgatatcggtcggaaaggaatcccatgatgacagaaccaaacactgcaaacaaattcacgagcattacggtgagagacgccatgtagtcagtcgcacctagactgcgtgcgtaggtcggaaggtatattgtcggcaagaagaatccgattgcttccagcgtgttgccgagctggtaaattataaaaactttgttgtataagaatcgaaaattcaaacggtgatatgcaacttctgtcgtacgcagcctcggtcgatgaaagtagagaaaaggcacagcaagaatgaacaatgccactgaggatatttgaagcgtagcctcaatgccatactggttcaaaagccactggatggcaagtgggaagacaattccggatacaccggacccgccctaagacatatatcagttcgactttccatcagagggagctcatggtgcagaattctgtgtaactcacccagacaataccaaaagccagcccttttcgtttatcgaaccactccgacatgaataggatggtgggagtataggcaaagcatccaccaattccgaagccgattccttgtgacaaaataagatgcacgacgttggtagagaaggaactcagtgccaaagacaaacacatgataacaactcctatggtggacacccagcgagcaattttaggcactaagatcatcaaaattattgccaacggggcaatcagatatgcgataccctatatgttgtgttagcgagagagggcgaccttgagtatcttgccaaccaaccatcgcacaagtgccaataattgcaatgttttcggatcctttgaatggctcgtgtgtactataatagtcttggaatataccaaaggcgaatgcataacctagtcgcgtgttagtttcaacaaaaatccatcttcgaccaagaacaataagaacgtaccccaaactagagcttcgagcattgcagatgccataagaaacagccatgcttgaactccaccatcaaccggcggcaacttctcatcgtctaaaatgattctgctgtcggactgttggtcgaagggtatgaaggatgtactccggctggtgaaactaggagaatactccttaggctccatgatgcaaaatgacccacgattctaaccacaggcgtgatggatatctggaagtacaatgggtttgtgtgtggaagccacggggagaacctcctttgaaaagggtttatattcaatgcggccgtttgacaagaaagccaggatcggcctagaaaaaagaaataagctaatggaagctagctgcatgacgaaataaatctccttgacaagaatccacccaattggagtgcaaagaagatagcgcaaaaccacatacctggaatccaggtagactggggtcccaacaatgtgatattgaacccctagatgtaccgatatggtccgtttcaaagtcacgcgtccaaatagactgtaccgtggtgatctaggtctttggttgattctagtaaacatctcctcggtggagaatgtattctctgtcgttcttcgctcgctgctaggacattaggcagaatgtttcaagttactgcaattcgaggccgcgtcgatcgggtgcgggatctgctccagaaatagtccgaatgaaatgacaacggtctcccctagggctggcagactgtttaggtgcacgaaccgccccgctcggcggataaaatgggaaatggaatgttgatcggggatcattgcatagcagagctggtgggctcggagaattccatgttgataacaggtttccgacccgctgtcattggcagagataagaaccaaaggagactcacttttgtcctaatggatgaagcttcgtcgctgtgtagatccaatcagtatatatgctcccatttctaaatgaggtcatgcacagacgttgactctttgaatgcgttaaactcgtttgatactaccaaatgacataaattccagaatcacatgtctttaataagatatcgtcagcgaacgggacaataaacaatatacatacaatgtcatacctcttcgaacgctacacggaggggttgagtgacattccagccaacggagctactacatgttcttccattgaaccagatagcaccgtctcctggcattattagagattccactcttatcacagtcaagggcattaatgtccatcaattcttcacaaaccagctcggttcctatcatggtctgcgggtacagtcatcgtgcattgagtcccaatgctttgttggtggcggaaaacggctcaaatatgttttggacgatcgaagacaatctgttggtctgtcttgttatttaaatgactgatgaggttcatatggcacatggtctagatgatttgagaaggaggtcagttatgcccacttggacatctgaggttgtttacgtaatctggtgattccgggtgcaggagaccatcttgctcacattttgaacaaccaccgtataagacattctatgtcgtcgaatgaattttccaagatatatagcctcagttctgaccagctcaacaggtaaattacgccatttcataatggatttgtaataggcatggtccttctattctcattctcaatatcattgaattgaattgaattgagtcgagctgggagttccagactgcgactattgacagaagggagttaagtctgtagggactcatatcccgaggcgatcgaagtggaaagtgtattgctcaccatcccgagaggcctccgtataggtcagactgtcgccagcaggaacgtcagttggaggcgaaacatgatcagcaaaaccgcaattttcatcccaaggcagaatgaagagggtctcatttcacgaaggcgaatgtcgcacggcctcatagatgctcttgacgaagacctcgtccatattaatgggggatggaggatgcattgacatgtaggagcgacactcggggttgatccaagtaaattgtagcagaatcccagctttggcatcaatatagaactgggaaatcggaatgacgttatctttgccattcttcgcaatattttgaatacaaaaagaaaaagatcagaagttcctagtttttgtgacatatgatatgatttaccttctgagtgatcagagtaagtggtggtatatatatcgtacaatatcatccaagtattcatagtgagatcgggtgcattagcggataaccccttgtatttgctttatagaaatgttcaggtcaccgcatattcaatggctgcgctgtggattttatacttttgttcgaataatcattttctgtcttatgactatcattttacttcattttgcagactactagagttttgcatgatgagtcgaactacactgtcccgtgaagaggtcagctttctaggtctcggcgccgaaagcagcaccatgggagcagttccagcaaccccggtatccaggccgataaccgtcttggtattaatgaaggtgggattttgcttcgatgagcgagcttgctctaagtgcaccaacaatggccacttcaatttgatactatagaccaattcaagcctgacgtaatgtaatgccgacaccaactgccaacccccacgttttgaccattgtattccttcaaaatgatgactggcaaaatatcgactcgatcacaggaattgggtccttcgaagagtggtcgccagggctcaagaatgtgttgtgcccagtacagtcagggccgctgtactacagttagtgacagtccaattcttgatcggcacccgacttacgtgaagagacggcatggctttttcaaagacacggtgagaacgtccctgtgactcattagtctctctcaaccgaaacatggtaggtggaaatctatctcactcttcctcgatcggatggcaatcattcaatggcacatcaataccacggctcttatcggccgtttcaatgcccacctgcatggtcctgttagcatcagagcgtggacttcaggaagaacatacgcacgagtgttcttttgggattcttcgctgccgatgcagaaagaagcatcaagcttagaagcgacagctgcttgagaccgtacatgatgctgatgacaaacagaggtccgataatggtagtaatatgatggtactccgtataggatatgtactcgacggtgcctgcaagtaaaacgcagaaggccaacgactctttcagcaagaagatgccagctgtctttcccattatcccttgcgtctgtttctccgagtgctagggttacggccaactgtatcgtgaggttcacacccttttttgctgtgatctgccctatggaatacggagcatatcgtggagatcagaatatgactgctgattcgcactgcacggagtatcgaaggttatggttgaggtgcagtgtcgatctaggagtacccttgaatcttgggtgattctgaattctatggatacccatagaagatagagcacgttctgcaagtaacgtgaattagttaataaatactcgtcaaaagacttctgaagtctccaatgtcctaaggagtggaagtggccaggcgatgtctcccggttaacctccacttcaacaacatcaacctcgattcttttagtcgagtctcctttctttgcattttctcgactacgctcctattcacaatccaacaaaaactcggcggtttcattatttgatgagttgattcattttttattggactgggacaaccgtcgcatgtttacgccatgagcgactggtcccaccctgacacgactgcatccaattccaccggtgctgcatttactccgccctactgaatgcgatcctcgcgagatccgcccaacagatggaaaggaagaagggggttcaagactcatatgacagcctggagctttaccaggaagcgattcgcctgctaagccccttactgcaaatgcgcgatcctaaagttgtcggggcctacgtactgctctgctatcttgaggataatgtctgcttgcgcgcaggattggcgccgtcatttggagggatgtacggcattttttacgccttcgaaatgaatgggttcagcagcggtcttctcgagcagtgttttggtgctacgcacgcattggtattggtgagaatccatcttgttacatttttgccacacgacagcgcatgcatccagtgcgacatcgggtcagtcgagttgtttttgatgcttcatggcagcatattggaggctccagggctagaggggagctccaatctagaaggtgccaagcctccagattaggaaggtgcaagcactatccctgaccatcacctgatttgatttgtcaccatgtttacggtccacgggttgccgtggcggcaggaacttgttgagagtcaaacctgacattcaataataaatgctacctaggaaatcatgatgaacaatcgacacttggcgcaactacggtttcttccctgccaaacctcgactcttcttccattcgtccacgattccagcatacaccgaaggcctatacaccccggtcagctcagtgtagaacccacctccgagccggtggggattcagtcccaaatcgcgcagtagcaagtcattgtactgatcgaatcgttagattacgatgtccttgtggtttcacgcaacaaacatacctggatagcttcaacttcaaggccagttcccgtcaatgaacccaggaccacatcctcggagatagcgttctccataacctccagcggaatattcccaagcgaaaaagcctggtcttggattgacttgatgtccgcgggggagtcaagccctcctgttaaaaacgccgccacccaaagagcttgaacctctgcaacaacagcaatggttgatgataaaatcacaccgagcgttgcgaaggagcggtcacctcgtgcgactaattcgggggcaaccatgcggcggaacaagcgatatggcaccagcctgtgagattcggcccacgagggaggactccgatctgtgagagcgcatcttgtcgcattcaaagttttcctgaccataacctcggaacattgatctagattgtcccagcgttggatacggtcattcatggttgcctcaagcggcccattgattctctctggtgtttccacgcgaatttcacgatcctctcgaagatcctcgccctctgagtccacgacggctgacaaccccaattttagacgaagacttgcaggtttaaacctaatcggcactattggcttatatccggtggcgtggatgaccaaatcgacttcatcaatacaattgctgtctgccaagtgcaccgaagcttttgtgaatggatgcgtggtcttctccggcctggtagcgacaatatccatgatggctgatcggtaaacgttgacatggggtaatctaattgtttcccagaggtcttcctggtttgcgatgccaataccggatgcgcatgagacaacactagaaatcatcagtcttcaagtaacacaaatgacctctcattagacttacctgttctctgggcgaagcttttccatcttcggacctgagccatattgcgctgtatcctctaagcctttatcaattgatcgccagagccaacgaatccaccatcggcctattgggttgccatggaatagccgggctagccatgagccctcccaacggagacccccgggtccgagagacagacgttttggagtctcatagcagcatggggtgagatggctgagcagtcggctgctggcagccttatcacttgcaacggtgtcgccattcgggagagtagaccttggcggtaccatccacgcgggccctacacctcgatcacggatgatccagtgtacctgaacaggatttttctgtgtggacttgaggtgcaactttgggtcgttgcgatgtagagttgcaaagaaatgcaccaggtcaaaggatgattttgcaccaccataaataccgaccgagcgcaattgtgggtaaggggaatctgtgactgacattttaacagccccggactcaggtgctttcagtggctggtatcccaggtgttttcgagcccagtctccaatatcctttgcatggatgaccgggggagggtcgtcggacgccgttgatgactccttcgtatcgggcatatttggcaccgaggtcagtcctgtagccaacaccaacttatcgcagatgatggtgacgcgttgactcggcgacgtggacacactgatgtcgagcttccactctttagtgtctagacggctgatgtcgtcgacctatcgatcattcagaaaccccgcaattttagaatggattgagagtatcttaccgtccagttcaatcgtatgtgttttttcagctgccatttctcagcccattcacggagataacggttgatcttccagcccgcaatgaactgattctgtgtgtcatccccttgttcctccggaacaacgttggaaagaggcatatcactgaattcataaagtccatacgagttctgactcaacaaatttgggtaaagacgctcctcggcccaagtacctccaatatccgaggcagagtcaatcacaagaaggcgacattcggaggaggctgttggggaagtatcgatgctcttagtgaaacaggcagggatttccgtgatttcatcggtatgttcggctgtgctttcgtcgtcatatgccgcgacaagttgtagatacgtcttggctgcgatgagaccgtaaagacctaaacaagttagccaacgtccaatttagtcgtcaactgctaccaaccggctccaacgatcacgactcgttccatggctaaaatgattgaagagagagaagtcaggggagggaaaaagacggagttttaaatcccaaagtgtacaatgaaaaggtaacaatacgaagaatagctcggagctgcgaggattttgatattgttcttgtggggtcaccacaacaatgagaattccatttgaaatattgaaagtagtattttggaaatatcagacaacttgtaatggaaatatagtgaccgacatcatcttctgatggtcagctgtacctcgaacaggccgaacagcgcgattgactggcctaaccattctacacgtccagaatcaatgcccatgcttgatattgcaaagacacgcctactcacttcaggcgatgtttagatgggtcactaccaatgttgtaggagatggaagataatattcctactccataccccgtaaggatgtggtccccacgcaaatgttacatatttggtctttgtgggctgccgtaccccgtaccgctcgtgttgttgacctcgtcatctcgcgtactccatacaacatcctccgtacagcacacattattacatcgacaatatccatatcgatgtatcggcctactgttcccgagcatggagctattttcatatgaccaagccccaaaagttctatccccgatgtctgccttcgcccgtgacggggtcatgacttccgcctgtcaactatataacaccccgggttttgatgctcgctgcgggataggttgtgggatatctgcgcctcaccccagatgaagtcactcagctcaggggtctttctatctacttcactggctgttttgccttccctcccatgagctaactaggtacctgaagtcgcctgccatagtttcggttatactcgatcggagccctcggtcacatcggcaccgcctagcccggcagttgcttcacgggctaatcacatctcggccgatggtttgaaatccctgatggccggatttatggatcttttcccgcacctggcatcaagggactttgaaaaggcggggatttgctgtacaacggacattccgaccggcgatttcatctttgattcccccttggagcacaagcccttgtttattgctactggaggaagcgtgcagtaagtgaacccaagaatggacctttttcgggggatgttaactaacattctcatatccagtgcgttcaagttcctgcctgccttccgagaatacattgtgggaagcttccaactcaggctttcgcgggagttgcttgacaaatggaagttccctacgcagtcccgtgggcgtttccaggagatattcaggggagatggacgtcgtggaggaccagagcgaagggagttgactgctcaagagctcggcacatttgacccggcattgaaatattgaaagctgcttcacccaggccaggcaagatttgaagctgcgaaggacacaatccaggcaatatatcatgttataaagaggagcagttaccaattttcggagccattacataccttgaacgaaccagggcacgctaatgatatgaaaacatcagaccccttacttttcttcaaggccacgaaagacgatttgaatgatagatggcccgactttatttacctcagccagtcaggccgaggcttcattgatggattaggatatgcagtcaaggcttggaaagttggttggcaattctgatttgagaattgcttgcctgagaggacagtactaaatccgagaagtaaaaaagacccgaattgatgcgctttcttgtttcgatctccggatcattcgagagatacccggggccttctcatttttattcagatattttgtattttgtgatcaatgaggattcaaacagtctttcattcgcgagttcggagagatacgaagcttcttccatttcatggagtaaaagtgccatcagacatttccaccattaccttcacgaggggacacaaactctgcaatcaagatattcgcatttcaatacagttcctacattgtgtcctggaatgtcaaaataacgaacggctcatcggggcccattcgataaactcatgaaccgctcatgtgatcggctgaggcttatacggggaagttttataagttttataccaagatatcctgcctccagcctattcgtccaaaaacaatctgatatctatttccaagttcggtagctatcacgatctagcctgttatagaatatcaaatgttttatcttcatatgcagtacaacgtatgtaacaagccgggcaggaaacccgaccacccgagcggcgttcacccttcgcggaaattgcagccgattgtctctctgatcgtcgtggtctagtgggaaaaaaaggttagacgatcaacggcttcgcctccgctccgatcttgtgatcggtcgaaacccgtagaattcatatcctcattgggaagtatgaactcatgatcacgatggttgtcattgggatcgcgatctatattaagggactcgccttcttctgatagagtttcaagacaaacccattgcgctgcattcctccattgcagaaagacttgtcttttaaccttcgaaatgtcaacgctcaagaattacttcggacttgggggaaccgacgcccattccacccctaccgacaacaattccccggctcaccctctcccttcctcgtggtattcttcgcaggatatacatgaattggagcgacgcgccatattctgtcggaaatggcttctgatcacgcacaagttgcgtttccccaaaacaggcgactggctccgatacgacatcgccgggtacgcttttattttggtgaaagaccgggagggaaacgtcaatgctttccacaatgtctgtcggcaccgtgcattcccagtggttaccgaagagggtggtacctcccggattttctcttgtcaatatcacggatggtcctacggccttaatggcaagcttgccaaggcacccggataccaagaggtggaaggttttgacaagagcaagaacggccttcttcctatccacgtccatattgatgtcaacggttttatctgggtcaatttagatgccagcgaaaagcccgagatctcgtgggaagacgactttaaaggagtcgacctacagccacgtttcacgggtttcaacttcgaggactatgactttgataacaccggggagatgagtggagagtacaattggaagattatggcagagcactacaacgaatgctaccgtttctcaacgactcagtccgacacctcggtttccaatctcgattcatacgccgtggatgccaaatccacagccgaggagattgcaaatgggctgaagattgccagcacttactacttccccaatgctactatgaccgtctcgtgagtgtgattgtccggcaatgtaatccgattgatgctaattttgtacgcaggccacacttcttcttcatgcagcgactcgtgcctacgggccccacaacatgctcagtgcgctatgacgtttaccgcaacaagaaatttagcgccgaagagtttgaaatcatcagccaagtgtacaagcgcattatgtccgaaaaccaagatcgctgtgtcgaaacacagaagaatatcaacatgggtaaaatccagcccgcggaagagggaccggtcaacttccagactgtcgttcgtgacctgatcacacagcaccataagcgggaagaagatgccggggaacaattttggcctgcacgacaaagactccccaagggagaggcagtcagcaaagaggatatagatttctgctctaagctgagtaaggatgggtcacctttgacctcggggggttgttgtggaggaggatgtggagctggacctccatctagggcagcaacagcgccggagactatggtggtttaacgatgtgcataatagcgaatgtttcgttgattttttagctctgaattgttcttatgaagatgacatgttacatgcacaggtataaactcaaaggtcatatgaatatgtttatgatacgtaggattccaattttactataaaagagaccgattatagcagtctacaacacacttctgggtgactagcccaggccatttggatttggaagtaggtcgcaaatgccctcgtccatacaaaaactcaatattagtaaaagatagagaggagaatagcaaacgggatcatttaaccctattcagtataaaagttcaggttacatgcacatccacgcacgtagattaggtcgggggcacctatgaggcgaggggaagaggaaaaacctcccaaaagacgcccttttccccctttctccgattactccaagataatctcgttattatctcctaaacatgcccctctcttaaccttgtcatgacgatctccatctatcttatctcttaactagttatcttaactatcgtgcctatcgctccaataccccgctacatccgccccgttttctaatttccccttcaatgatgccacgagagagcgcgcgcggaaggctacgttcccacgaggcctgtcttaattgcaggtaatgcaaatacactgtctgtaagtagcgggtggtactgatctccctatagaagaaagaagacccgatgtccagccgagaaaccgtcctgctccagctgtgtccgcctgaatcagccatgtctttatactaccatacccagagggtctcgaggagggcaatctgtatgtactggcttctggctgtcggtgaccaatcattgacttttttttttgttccttacaggacgaccggctagcattcctcgaagagaaggtaaacctcatcctgagtggcagatcaacccaaacacttgcatcagaaaagacacaggagaaggagataggaaatgcaatttcagaaacatgctatcctgccacaacacgtccaccctccattgaaccaagcacggtcagtgacccattcttcctcggttttggctacgaggactcgatctctcagccgtcatcatctgcgatcgccaaagctattgatctttactttgaatattgccatcgacagccgatctggtgttttgatcgtgaggaggtctcggacccaacttatctgtcagaggagctcgtttgttgcctactcgccttgacctcaagattctcaagagatcgtgaccatttacaacattatggagatagtgcaagaagcctagtcatgcttcggatggctaacggcacagtggagcttgaaaccattgagagtctttgtctactctcttattcgtcatttctaggtatgagcctcggctaccaagtcgagaggattccattgttaatattattctagacggagatatacacctcggtcgcttccatctcggtcttgctctacatctttgccggtcggcaacgctggatctcgaatcgagtcatggaggcgaaggtcccatggccgagcgaaagaagcgtctgttctggagtctccaatgtctggagcagtcctacggacagcaaaatgggtttctctgtatcccatcggaagtcctgcgtaccttctatgttgcctccagtagcgaccgcgcaaaacaagatgggacggaggcgaaacctccaccgctgccgacagacgatcttgggtgctcgaaaccatccgacatggggatttggagcttagcagctcattttggctgggtatggagcagagtgcgcatatatgtctccgattgtgctcgaaataggctcaaagaaccctggcgaaacgattcaatgtacgccatggtgctttccgacctcacagaaattgagaacaagctttcccagtgccatcgatatgactcggtcaaattttacgagcgaacagcagaggagctgagatcgagccgaaactactggaccccatggctgaagctacagtttacttaccactgcattctaacggttctaaaccaccccttcctctacattgtggcatcacaatacaatgacaatttggcaatcccaaacgctttctggagacgctcatccgagttggtcttgttacacgctacctggcttgtccgcatgatagacatggtatccgagaagaagatgcgactgatcgatccgttcttcggacacgctgccgccattgcagctacggtgcatctatactactgctgtgccgcggatccccggctaaagtacaaatccaaggttgatttcacaaaatgccgaaggttcctgaagagttttgtgtccttttcgccagcttgtggggtcttggtcggtgtcatgaaatcaaaccgccgcttccaatgctaacaaacgcgcaggatcaaactttggacaagatgactcgaattgcttccgggtcggaaaatatcgatcatgactgggaacctgagaagattcatcttagtatacctttaatgtgggatgttcttcaaatcaactgtaaacccaagccacacgaagtatcgacgggtggtttgctacatccatcattgaccccaaccgtctctacggaagaggcggaggacagccctgcctcgactctggagattattgttgcgatgtctcccaatgtcacagtcaacactgcggacggtggtcaagctgcgcacattccaccaaccaaaccgtgcatatcttccacgccagcttcttccggccctgatcctggcgagaaactcgttgcgccagctgacagtttaatgaccaataccccctggctatggacggatccctcgcaattcgttgatatggagaacactgtgggatacgcagattccgaatccgctctcggaaacattgacggattttcgacttggtgggactttggaaacttataggagtaatatgttcattgacttctactgcggcgttactgtcttcctaaggccgtaactcttgtctcaatccccgcatttatcttttgccccaaagcccctatgcaaaaaagacccttgtgcggaaacactcctaactgacccccagatcaaaaacttgatgcccacgcgtcctcgatcaagttatgccgctgcgaccgtcttcagcctttcttgcaaggcagcaaagttccgtttcatagcggtttcggtaaactgcgccccagtcaccatcggatatttcttcgagggcccctggattaaagaatccttacagggctgattgaagtaggcaatgctgtatcggtcgccaaaatagtcctcgggctcacaaggggccttgacacgatgaaaagttgacttgaaccggtcatccgaccaggacatgagtaaatcgccaatattgcacacgatctcaccagtgttggctttcaccttggtccattcgtccccaataccgaactctgtcaccacttcgcgaccgggacagatttccagcccatcctggccatccccttggaaaagtaaagtcaaaaagtcccaatcggcatgtgcccctgcgcgatgatacaccttgccgtcgggaacttccggcaaggcaaagtaatggagtagacgcatagttgtttgcgagttcggtcgtgagatgccatgacactcgatgaagaatctctcagggaatcccaggccccgtgcaaagcatcgcatcaaacattccgatacttgttggacgcgattcataaaatcaagacaggcgttccggaaaccaggcagatcgtcgtacttgagccagaggtcattcatattctcgccgaactgcaactggtatgactctttactgtcgggctgcccggtagacggtcggatttgtgagttcttttcccacccgacattgtttggattccacggtacagttgccttgacctcgtccgatagatcgaagaaactttttgagatcgcaaacatggattgaatgtcttctttggagattccatgattgatcaaggtgaagaatccgacattctcggcggcatggatgagttgatcagtaatttcctcgatgcgatcttcaaagtcgtgcatcgagatacgtggaatgactcggtcgacatatcgggtttcagatgccatgtctcttagtagtccgggaacttcgcccatgtgcacacaataaattatggaagcttttataggtcactcggtatcacgtccaatatacgtgcatgctggacggaggggggcttcgagctgataagcaagtcgagagctgtacgcggagtaggacgtcatcaataaggtatatagatgtagagaatccggacactctgcgttgatagggcaggattatggtcgaatcaattcaactcgataagacattgtcagcgccttgaaaggtcaaatcagaaaatgtacttcaggcactcggccgagttctcagcttccagggattggctcggactaaacgctgctcacggggtatcaaattatctatatgtccaatatgtccacatgtatctactaaatgccacacacgcaaaaacaatttgggcgagtgcttggtgtcaaaacagatagtgcgcaaaccttcaagatatggctctattgaaccttgcgcacttgggtcacaggtgaacgatatactcggcgaccgtgtacaatgtacaaaacaattgcaaatatgaccaccgctccgaagacaaggatagaccaattcatatccaccagagtcgggttattggtggttgggaagaaggtgaaaatgatggcaaagcaaagccaggccaatgagaaaacattgatcggcaatccaaagataccgagcgaaaatcgcgaagggggaataccacccggttggaaacggacccgaatgatggcagcaatcggcaggatgtacgtggtgaaaagtgcagcgatcatcacagatgcgacagcattgaaagccgccgtagatccgatgttgatcaagctcagtagcacggtaataatggtcgataccaacacggagaagatagggatctgggtgcgtcgattaacgtgagccaactgcttagagaacggcaaggcatcatcgcgggcaaaagcgaaggtctggcgagagactgtggcaagaataccaatggcgctgcaaacttccatgacaagaatgatagcagccacaccattagtagcagccatcgagccggttgcatgattaactgctgggaggaaggagaatccactcgccggggcgagtacatcctgcaagtctcccatcttatacagcaaggtgattagcatcacgaaacccagagcgccgttgatcaaagcggtcgaaaccatacaccacggcaccaccaaggcagcattctggacctcctcggctaagagacattagccatcgcgaaataggagagatatggcgtttgacttacacatatgtgtagcagcatccgggcccgtccaggaaaagatcggagtcagttggcccaccagacacgcgaggcccatgctcggccattcgccagcgtttgtaaactccttccagacagaatccccagaggcctgtcctggagacatgacccacatgaggacaacgacaacaacgaaaccgaagaggtgaatggcgaggatcagaccctccattggagggagaatcttgtagccccaggtattcaccacagttccgacggcggcgatgccgatagtcagcagtgtcccatgccagcgctcaaagccatatagccaaccggagggatccgagtagttgaagactagcagtccttgaatcagagtaccgcaaaggtagcaaatactcgcaaacgcagcttgccagcctagtaccgaaagccatcctagaacgggattagcggtggagatcgtcaggttgtaattcgaggtttcggctaaccggtgagatagctcaagaatcgttggcaccttggccaggcgaattcactgacccagtgatactgtccacccgatgttggggagctggctagtcaatctccatgcgctccatgcgcaacatgcgagggggggggcggaacttacatggaggcaatctcagccatggagatcacggcggagaagaatccgacaaatgaagcaatatacacatagaccatgccggctcgtccgccatcaatcaagccgtatgtactcgtgctgcgccattctccattattcccagtgttctatcataagatcgcgcgtccaaactcacagcagaatcgactcccatgtggccatcaacgtcgttgtgaaacctaagatcgaataaaaacggaagtttctctatcgctgatcagtattgcgtccagtcctaggaaatgtacaactcaccttgaactgttgggtctttccaaggcgctgcatgtcccaatcatcctggtcggtcgcgtcgattccgacgtcctgcgacaacacgttgttggccaatgcttccttcatggcgatttagggtatagcaaatggaaaggaggaaaggcgatcagatcaaggccaaggggccccggagaaggtcataatcaaaggggggaagaactggggagggaagaaaagcgcgaaagtggagccgaagaagtctatttgctcgaggacaagtcatgctgcagatccctcatggatgaatgggctttatcttatgagtcgacttgtagatgtgaacttatagtccgtagcataaataagtaactatggcagattatcacacattgcagaatcccacattccagggatatctttctccacacaaggtcaagaaaatggagtaaatggagtatacaatatacactcgaatatgattcgatccttgcacttattaactccacagacgggaggtttcttcagcgcacaacccgctagctcatatggaacgaatgaggtgagctggagatgcattgtctatcaacgtgtacctatgagacattatcattcacaagattctagtttagacggtcgcactttactattatgttctcattttgatatctacaaagaatcgctaacggttatgattaatagaatagcatagttcaaagtacatatgttccattcatatatattcttgttgttgaatgatggttgaccgttaggtccgtttactctacatctaggtcgtgagtcaactattccaacataaccaatgcgcatgatctgttcttaaccggaagtactccgtacactcctttatattcccgacattcttccgcaatcaaattgtggttgctgtacggagtatacctaccaatataactataccctactacatataccacggcatttctaaatccgttcttcttccagttccaagataaaccccctatgttgcatgtaccgtgccaagcgcctagcatctgccgaattagatacatacccaatcggggatctagtgaatgacgaatcttggcgtcaaaatacgaaatatcatatgaattgcgtgtccttttttcatttcctccgcacgtatgttctagccttgtcttaggactaaaccgaatacagatattgagaccgacctgggggttgaaaaggaggcagagagatcggcagaagaaaagggaaaaaacggtagacttgcgattgagctccagatgactctgtatattctgaatctatttatctagttacaacatccgtggatagttcgtagaaacaaattgtcttatctgatccccaagatttgaccccaaccgccacatattaacgccacatcctcgaatacttggatgacgacgcgtggggctgatggcgttgccgttcccttcggcgcccctcggcagatattttcatcgctggttggtgcagacgcgcaattctcaatggaatttcgacccacggggagcttggcagaccatgagattcctacaagatgaaaatccgccaactcccgaatcgcccatacgcgtacgagctgagttccactgttcggatcgccaagaccgagtggttcctgcccaggactctttcggatagacggagaatcgacgtgaaaaggagagtgtcaaatataaccatgctggcccagcccctggctccgacgcaaaagactctctgtccgaatctcttgtttcgtccgggatgcgctaatgttcttgcggacttctgatagcgtgcttcgcctgagctcatggcttcgcaatgaccgtctgcatgcccgcctgcccttccgatggattgctctagttctcgccgccattgggggcttcattctattttatctatttgcgatcccacaacttctccggttccggttccgcgtcggtttaagctggtatgatctaggagctcaagggttcggtccagatcgaaattacaactccttcgatcaagagtcgcccatcgtcgaaatcaccccgcctggcgcaaaatgcgatccccggtacacatttcttgcgcctcggggcgattcagttgcccatcctggtccgatgatcctggattccactggggaacttgtgtggacaaaatggaatgagggtacgacacaagacttcaaagtacagcggtacaagggcgaggactacctcacttattgggaaggagacacatccgacggtcatggacgagggtcatggtacatggtaggtcatacatacattgagctcgctcaccacaattccggttctctaatcacatcgtccaaatacagcttgattcgacctatacccaaaagtacgtggtgtctccaatcggcatgtatgacggcgacatgcacgatttccaaatcacttccaacgataccgcaatcttgataatttacgaccctatcccgatggacttgagctctatcggcggcccggggctgggatggatgtatgatggagtgttccaggaagtgaacctcgaaaccggagaactgctatttcagtggcgcgcatccgacttttaccacccgagtgatagttattatccgattggagataatggtcaggaacgggcctcggggtatgaccactcgcacatcaacagtgtggacaaggatgaccagggccggtacctggtttcgatgcgccacctccatactgttgcatgtgtagatggcatcactggcgatgtcctatggtcgctaggaggtaaacggaacaacttcgccgaggcttcggatcgagctgccaccgatttctcatggcagcacgacgctcgctggcaaggacccaaccgcctcagcttgttcaacaacgcagcctataataatgaaaacctctcggccgtgagtcgcggcttgatcgttgatctggatacagaagcgcggcaggcaacattactgcaatctttcgagcacccgcacgatatcaaggccgtttctcaagggaatctgcaagtactagacacagggaacgtgttcgtgggctggggtcactctgcagctttcactgaattctccccagagggcgatgttgtatgcgatgtgcactttggtgcctgtgctttcttcacatttggtcgtgtcgtctcctaccgggtgttcaagttcaactgggtaggtaatcctgtgacactcccggacactgcaatcacaccggagagtgtctttattagttggaacggtgcgaccgaggtagctgaatggcgagttgaggcatgggacggtgaagacctcggaaatatgaccttcacggctatcgaccaggtccctcgcgacgggttcgaaactgaaattccactgacctccaaggttgattcattcttccgcctgcgcgcaatcaactcaaacggagagagcctcggtgtaacagaaatactccagcgactaccatcgcaaggctctccccatataagcacatgggccctgggctgcattgtgtttgtggtacttggctgccttatatgcggtgtttactatgctgttcaccgtcgacttcgccagggatgtaatcccagtggcacgtatcaattggtatcatataaggatgaaaaccagggcgatgatgagtatgatcgtctaccattataggacgctggagttctagatacccgttctgcctgtacataacttggtctgcacatatttacggatagattcccatatatttgcacattccttcttcgcgccttttcttatttgttgccggcaggaatgtggtgaggatattccctcgctgttattccgaaccctgttcattcgtattgacgtcaccatatctgatatcaattcctcggcaagtgacttgaatctgcaggtcccgtggatcgtgaagcccaatagaacagggaggttgcggaggttcttcttcgcttccgctcatttcttatcaaaactcatttgccaaggctgtcaaaaacctcgggggaacgtaggggtagaggtgtgagactcgatttcgtggccgacgtgattccggatatcttgcctatctgagatggggcagtgctttaccgtttgagccgtaaatatgccaagaccggaccaccttccgactctctagatgctcatatgtagggtatgcaaatgatgtttgccaaaccgaggctcgcccgaaaatggcgcgtcgtgatggagaggactccgagaggtgcccttggcgccaagggtcacctgtgaatctgatgtttcagttgaggggggcgggtactcttggcgccgctcgcagagtcccgctcctaagccaagccgaggtctcaacgccggtcacaagaatttcccgagcagtactcaagcaccgtttccgcccctgaaaagccaccattgcttcaataccatccgattcaccttccatgatcaaatcgctggatgtatgattggcgaaagaaatgcctcttctccaccttttgtcgccaggatcaggatgataacattggatccttctcggcgaaggaacaattttggactcctgactcctcgaggtcaaggccaccgaagtgtcctaggcatgagtcaatatcgagtcatgaccttcagtcttctgtggctgaactaggaagtaggtacatgattgttgagatcaaggtatcaaggttttatgagtaccgctcaattcagagtctcttttgacgtagatggcatacctttctgtctcaccattacgttctacaattcctgtctggtcggttcgaaaccagctcattcttggctcctggccaagccctatagctatagccacattggcatttatatatctccttggctgcttctcagttattgataggggaatcaaaatctggttttgttgactacggaggagtgaaaattcagcagaacttttcactatagccatgaccaagatttggcattgccctactccgtagttcaattagatagtgaagtggatcgatccatgtacgtcgctttagccagtccacactttgtaactgaatcccatgtgcccacatagtagctttccccatgggtactcgttgtagcgaggaggtatgagttggaacccgactaacttcatttagaaacctcccagctcccagtcaagcaaccgtggtctgcttatctgcattgagggtagtactgttgccatcggaacgttgatctcatactggattaactttcgagcttcctatggacctcctgatttgacatggcgcttcccaattgctttacggtgcgttttcggcctttttcttttctaagtcgtgggccgccgaaaactggggttgtggttgcctgggtgtatagcccacgatctttcttttcgacgggaaacgcaggtgtcactcttttgtcttgttactacaatagtatactttatataattatttttgattctagggttcctttaaatggaggtaaaaaaagaaagcaatgaccgcgacttgaacgcgggacttcgagatttgcacttgggatgatgttagtattggggcgactaatcactttagaagcgaatatacatacatctcacactctaccactgagttaccactgcaggtgatgatgaaacgcaaagataataaactataatacgctaatccttaaaagaagcttatgtctttcaagctttagtcgttacaccacactcagcaactattttgttgtccataatcaacctacgggaaagcattttgcccagtttaacaacttttcactaattttgcttgacaccaactctgccttgtgacatttgccattatataaaatagagcctggccacgccactcgcaagtgggcatattactacttgacagtagtaaagacgggatttaccctccgggcatctagtgttagtacccattacctctattcctgccatagcctcactagacaggactaaggcccttcgactaagactcgccgaatttgcctaactgggagatgaaccaggtcagtcgtagaagcaagtgaattggctgataaagggattatgctattgcttgtcactttcgatattgcggccggagctgtgcccccggtacggccaagatagtggttattggcatagtccagcagccagagcttgagagtttcctcgtcattccctcacatactcgatcttgagctcttccttacaaattacaatcaacctagacatcaacctagtccacttaaacctatttttaggtccgtactacagtctgcccgactacaaactggaatgtcacctattaaacaattacatcgacgtatatacaaccctgctcccacctccacgggtgctaagatttttgttgcgtcactgtaactcgacatttgcgttgggagtggagacatcagacgggacctggggactgtcaggactaaacctaacagcgtaattcatcgtacccggcatttatgtgtagatcaaatcacgtaaaaacatcattcatttcctttgagcacccggccactcatccggtccttcggcttggggatgagagccctacgcggatgaatcatatcataggttaatcattttgagagttgcactaacaaatgcgaagttagaaagggagagagtaaagaatgatctcggtactggttagggctttgtgtcaatattagcccccttctgatgtgttgttggtaatagatagaggggtagagaggggtaattttatagacaggcctgcttcggtcactgtataaaatcattaagacgaccctcaatgaacctctcgattgatcagttaactacttgcgtaggtatatgtgtacgtaggtagccatgcttgtggaataaagaccaagtgctttgagcggcgatatgagcatcaaacgacatacatttctaccttcccatacatcatattgatctaatctaaaacttttagcttagcgctagatatcatctccagggctataagatcagtatttcttctcgtgtcaaattcgtccattccaataacaacatttccaaggcctgtgtcctgtctaaagacttctcaataaaagggccctcacataggttgtctcccccaatcgtctgccctggggaggtatttgattgagttttcccatgtgatgtgtttggatagattgccggtgggccgaagtctgatattgctttgagcgcatcgtggatccacggcacatttgagggttgatcatcacaagcgtcaacagaaattgctggtagcgctggtagttttcgaggtgtatccttgatctctggggaggcatagccttcttcacttatgtcttcgaatcgtggccgtttgagggcggatcttagttccagtcgctcgagaactccttcgccaatattcgttactcacttgacctcattgttcttttcctgccacaggtgcttcccattggtcgttgtgcgagaacctggcggcagacgggatcatccggagttttatcggtgtggtggactcggatatgtctgcaacgggtggtcaatttaatagtaagtgatcagttttgtcccgaagttttattcttttacttactaatgaagatgatatgaactgcgggttcatcgcacagacccgcgccgctcaaaccgtccagaaagcaatgaaccaggtcaacaaggctcgtgaccgattcacatcattggttaaagaaagggagggaatccaaagtgaagtctaaataggtcatggcccttgtaccagagtgggaggatatccaacaggataaaagaaatcgggaagcagctatgagattactacaaatctgagatcaatataactgaaattcgcagtgatttcatagaatcctcgctaggtagaaacagacaacccgtttagtgcatagcccgtttcatcaagcgatctgatggtctgacgttgcttccttcgccatgtaatgacttgcgtttcttgggtccctctaggtcaccgggaacctcagcttcaagcatgctgagaacttccgcgggtttctctgcttttaaagcaataacttgctcgttccttctctggttttctgggtagttttggtaagtaattacagagggcatgccagacctaggcgtgattgaaggctcaccatttccgccctttccaacctcgtgactaggtccatgctcgaaatggaaacaacccccagctatttccaaggcttgttcatctaagctgagacgatttgcgaatgattgtcgggatgcttcagggtcctttagagttttgcaggctggcaagtgtgttgacgctgaaatagaggttgaacgaccagctatgcttccaactgatgaggtatcacaactttcatcgaggaatcgctcccaccaggactctgcgatgatctcagtgtcgtcatcagaattcagttgctcggtcttaaaatagctaagttcttcttcaacgtgtatcacgacagggttggattgtgagcctagcggagcaggatcgtcttctatcacgatagtattggctttcgtgcctaggtccgaagaatcgatagaacccagtctgaacgcttttgagaaagttagcgtggtgaaaaaaaaatgcttctatgagatctctcaccgaaggcctcgtttgtgttgttcccggaggattccatgctgaagaagcgtttgttgatcaaagattgacttctgctctcttgttctattaagaatttcgtgcgaaacaagtggctttatagctcatgcccgatcgatcacgccttgcggattctctagcgcagacagcgaaagtcgcaaggcaggatttgattcaaacaaactctgcctgtctgtcaatcgttcccatgcgcaatgcatgaagtatgaactgccgcatacctactcatccatgtagtccaatgaacatatcgaaagatgttgttcctattcttggaagccgtaggtctgcatatttttgcgcccagaggttctaagcctaggttgatcatatcctgcttgccaatcattctgtgacctgagagataagacagtatgatcccggccttgttcgttcttccaacattctgccgttacatcttaaaggcagatttggggacccgctccgttgacaattaaccggcgaatcggtgtgtgaggcggcaggtcgcaggtcaacgcagcggactaaaggcaaaattgcctcatagtagtcgtactggagcaatcaatcatgatatgtcaggccgttcctattttcagggtgatgcatgtctgcgctgggctagagcgcagtgttcttccaccgggccgactgggtcctgcttgccagtcgttcctcgatcatagactgaagaggagacgagactagcgcactaggccggagacgagaggcagcctcgtcgtctccagtccgcgtgacgccgatgccgtaacagtagacctatttccgggtccctccatatcatcctatggaccaatcgattatgaggttgatcgatggttgcgctgataagccgaattaggtgactgggggccaagcctgcgcatatctcctgaataaccgtaagggaaacgggtgtaggtcgggggggtcgacatcttgcacgctacctaagccgtaggcgattttgtatggtggtctgcaaactgagcctagagaacatcacggtcaggtcatagatcgttcgtgtcgtaatatttggggactccgcatgcactggccgaaaggaatcgcggctaggacagttctatcggtcaaataagccaccttggtcccaagtcaatttcattttgaaaatcaagcgagagctatccctcaagtgtgtcaagaccctgccgttccgttctttgtatgctgcggtgaattcgtagccctggtccacgtaggcgattgtctaaagcgagcgaaagccgcgccgataacgggaccaacgattgaccgacagataatcacattaggacggggaattcgtgggtcagcatcagggcgtaacagaaagcacctgattaggaatgaggggacggaaagttgcgtataggttacgagtcacacagggaaaaggggggtggcggagctcaggagctcggtgatccggatcaatagcaaaaatgcctcacctgcaaggcccagggattacccgggagacaagggcgaaaagaaaaatgacctgggttatttgttgggtggtggaacaggggagtatatagaaccacgcacggggaggcatgaggacaaagagcgctaaactgcaagtggacaaactaaactataaagcgtaattcatcgcacccatccgatatggtgtagtggctaacatcgccgtctctcacacggcagccgggggttcgattccccctatcggagtttattttttcctgacataggcttccacctcccggtttataccaccggaggatttgtcacgagatcatttcatgagacggttttgcaagttctatctatcttaagaccctggcaccgggcttccattcagccttctcgagcccttttgtgatgcacgagacatgcgctctcgtgattggcccaattctttttctcttccatcccctcacttaggcacgggtctctacagcaatgtgaaagctgtcaggaacatgagggtcggttcacccattgagggaccgaatcgtgccatacaccacgttgacgctagcgagggtctggagatgctcgaagatagcatttgtggccttcgaatcaccgagaaagagcttcagacagaggcagctgaattcggcgctttgctgaaagacactacgaatcgatttgctgcattgagtgaaatgatcgaatctcccagtaagagggttctttctgtctccagattctatcgatgatagagagagactccggagaattagggcaattaataaactatctactccgtagttagtacttgcatcgggcagtgaaaaaaaaaaaaagaaagggaaaaatctggcggtgagccaggcggtcaaaatttcccatgggaggtcgcccagtacggagaacaaccttcaaaaccccaagcatcctgtcgtggggtcgtttcgctcttcttttcgcattcgacttcagtagcccgctgtcaagcgggcgtttaggcgcgcaacgttgattcctacagtctaaacagtggagatgacgtccccacatcccaaggacatcgggatgagttccccgcgcgaaaggtcgcagagtgttgcgtctctgaaaccgatagagctttcagagacagaacaaagacaaacacaaccagagactagagatcgaccacagtcgactacagaggttcaacagccaccaagcactgggtttgaccctgctgaccgtgtgttccctattcggtcggttgtttcactcgatcccaccgttacgccccaccattcgggttcagtacactcccgggacacgatatcaccaacccgagaaggggcgcgacagtactcattcattgacgaagggacatggaaccaaatgcactcgcagcgttcttccgaccacctttatcaccccgatcccgaacacgccgaacctaccatcccaaccggtattcctcgccacgaaacgcatgctatagatggaaaaacagaaatcgcgacacattctttagcatcggaagttgttcaacaccccgaaatttacgccaaacctgccccgagtgacaaccagtctggaaatgggtccaccgcgcctccatcctccaatacgcaacgcagaaacgccgaagaccatgttcatgttactgcccgcttcaaacatgtcatgacggacagtggccatgccgtcatcacaggacgagatgggggagcatttcaatattgcgaggatgagcccattcgcatacccggggcgattcagagctttggcttactgattgccctccgcgaagagtcgccaaatcagcttatagttcgcattgtgagcgagaactcggctgacttcttgggttattcgcctaaacaattgttcgagctgaaaaatttctgtgacattttgagtgaggaccaggtggacacactcttggatcacgttgactttgttcgtgatgatgcacacgacccatcaatcgacggaccggaggtttttaatatgtccatccgcacagctaatgggaagcgctgcaaattctggtgtgccacccatgtctctcagacgcaaaaggatttgattatctgcgagttcgagcgtgaggatgacgaggtgaacccattgaatgtcgcgggccttgccactccggcagtccccgcagacaccctaggcattattccaacgccagatcaactcgctgcgagcacaatcaacattagccagcctctccgcgttctcaggaatgcccgccgtaggaggggcgaggcatctccaatggaagctttcagtatcttaactcagatacaagagcagttagggcggacgaataatctagaccagctgcttaatacaactgcaggattggtcaaggaactgacaggcttccaccgagttttgatatatcagttcgatagcagctggaacggcatggttgttgccgagctagttgatcccaacactactattgatctctacaagggtcttcattttcctgcatccgatattcccgcgcaagcccgagaactatacaaaatcaacaaggtccggctcctatacgaccgcgaccaagtcacttctcgacttgtgtgtcggaccttggaggatctcgaattcccgttggacatgacgcacgcctatcttcgcgcgatgtccccaatccacgtgaaatatttggcacacatgaaagtccggtcttcaatgtcaataagcgtcaatgcgttcaacgatctatggggattgatctcctgccatagctacggaaatgccggtatgcgcgtgtcattcccaatacgcaaaatgtgccggctcctcggcgacaccgtgtctcgaaacatagagcggctttcatatgcctctcgccttcaggccagaaaactaatcaacactgtcccaaccgaggccaacccatcaggctacatcattgcatcctcggatgatcttctacaactatttgatgcagattacggtgttctgtcgattcgcgatgaaacaaaaattcttggtgacaacaataactcccaggaggtacttgcgttgctagagttccttcgcgtacggcatttggattcagtgcttgcctcacacgacatcgtcaaagattttcccgatttgtactacgctccagggttgaaggcaatatctggtctactatatgtcccgctctctactggaggtagtgacttcatcgcgttcttccgtcgtggacagttgacagaaatcaagtgggctggtaacccttacgaaattgaaaagcgaaagcaaaccgcgggatatctagaaccacgcgaaagtttcacagcatggcgggagacagttctatcgcaaagtagagagtggacagagacggacgtggagacggcggctgtcttgtgttgtaggttgtctccttgagatatcctaaatattttgcctcgattctttgaagactgacataccttgaacagtggtttacggtaaatttatcaaagtttggaggcagaaggaggccgccatgcaaacatcgcaacttactcgcctacttttggccaactctgcacacgaagttcggacccctttgaatgctatcgttaactatctagagattgctcttgagggtgctctggatgatgaaaccagagagagtttgaccaaatcccattcggcttccaaatcattaatttacgtgatcaacgatctccttgacttgacaaataccgaaaaaggccaggacctcatcaaagatgagaccttcgatctggaatcgacctttagagaggcggctgatatgctgtctggcgacgccaagcggaagaatatttcatacactgtttcagtacatcctggtattcctgagttagttctcggtgaccagcgtcgtgtgcggcaagtcctttcgaatgtgatctcaaatgccatccaacacaccaaatctggcgctgtcacgacagaaatttggcgctccaacggtcaaaccattccaggccatgtgggagtggagatgacggttgttgacacgggtgtgggcatgtcgcacgacaagttgcagaggctctttcacgaactcgaacaagtgtcgaccgatgatacctactaccccgaagaagaagaagagaacacgcagaacctaccgcaaaaacgtgtgttgggtcttggtcttgctcttgcagcaaggatcgtccataacatgcatggtcagctcggtgtcagatcagaagaagggaagggcagtcgtttcaagattatattgcacttccgattgccagagggaacaaccgtggacgaagatgcagatggaatgtcccctggtgttgccattcctgcgacgcctatgctttcagacaaggagtttacactggtttccggagcacatgaatctcgtgatgccagacgacgaagttctgaaagccttcgtagtggtgccagttcccgtagtggacacagtgggcgcagtgcgagaagtcacgccgatcgactcatcagtgccatgcaagagcctcctcttaaaaggtctactagccaagatttggatctgagacggctgaacctttcgtcgagtcctgccagcgccagcagcaataatgttcatcctcctcttgcatcaccatccgctgtaaagcgatcattgactatgcaggatccgcattcaagtctgtcttcggtcacgcataccccgccgctcatgttacagccgcttgtcagcccccctcccccaggtctggaaaatatcacggactcgggagtgccgatgggtgctctgcgaatgtcacaacattttgctagtctcggatcaccacccatcgagcccactaaagaagataactcatacttccccagagtttcatcaatcgcagaaacatcacaagctccctcctctgggccagcatcatctgccccagcatcatctgccccaccaaccaccgtaccttcaacaacagactccgatcccctcagtgtccttgtcgccgaggacgatccaatcaatagcaagatcatacagaagcggttgaccaaactgggccacaccgttgagttgaccaacaatggtgaagcctgcacgattgcttttgcctcagctaccaaatattttgacgtggtgttgatggatattcaggtatattgaaaacacttctcctatctatcttcttcacggtcactaacccttcccagatgccaatacttgatggaatgagagccaccagagcgattcgcgagtttgaatccaagacacccaaggaagcgctctccgaaaaagctatacacaatgatcgagtacctatatttgctgtgtccgcgtcattagttgaaaaggaccgcgataactatatcgatattggctttgatggctgggtcatgaaacctatcaattttgctcgtttgaatattctattgagcggtatctgcgattcatccgcccgaaaagcagccacatacacgcctgatggggaatgggaaaacggtggttggttcgacaccaagtaacgaacatttggtcgttgaacggccgtccttaaattctgcctccattctcacctttcctatcatctcttgattacccttgacccctgctcattcccaaggataggtccacacgcaaagctcagtccctctttgtccccagtctatcgtggttcgagctttttgttccgcgggcatattccttggaggtttgtgccccatttgatgatttccttctatctacatgacatttgtttatttgcttatgccggccgcggtacatgaaatgggcctgtgggattttacctggcgttccttgtgacttctatatgtaaaatatacggataccctatacgtcacatgtttgtgtttattttcatgttcttgtcatttttcactttattttcgcttttctttctatttactgttcatctcaatgtcgggatgtcatgacaactagttgtatggtcgagctacgttgaggtttccttggcgatgtaaaacgctgtcgccaagcgcaatatctgatgccagcatacagagacccactggccagaggggactagcacagatatacaacatttcgtccccagtctcaaccctatctgttccagcggtgctttcagcgcgggatgagtggtgctggtcgcataggccaagcttttcaagacgagccagcccctttgagagttgcgtttcattcattggttaatgcttgtatatgatgcaagtggtaggtgtttcctcccgtatttagaagtcgagttctcgagagctccctccgcagtctcctggagttttaagactgaccggcgagttgatggcagcgattttgatatcttgttcaaatgtgctgggacaccgcgcaacctccccaaggcctaagcccaccgtcaccataccatctagccgtttgtcatgcgagactgcttgaccacggaaatgtgctgccgtgatggagccaacttgcacatagtgtctagacgtcgcgtttctgttttctgtacaagttttacgtcgcagtatcctgtcagcatgtcggcaatagtccaagatcgattgggacataatccatatgcttgatggtgcacgtaggggtaagtaagctaccctggtgagtatttttaaccagtcagagtgtggatcttgatctgagatatagggaattaattagacccagtaagtacggagtaaattctaccttatttgcttcatttgcttcaccagtcttggaaataaatagcaaaaagaaagcaatgaccgcgacttgaacgcgggacttcgagatttgcacttaggatgatgttagtattgaggcgattagtcgctttggaagcgaagatacatacatctcacactctaccactgagttaccactgcagatgacgatggagcgcaagtataatacgctatactaggcttaccctttagatgaagctgatatactaattcccatcggatatattcattgacgacacgtaattcttacacaaggcccggggatagaggacacggcaagacttgcggaattactacgagatgctgggatcccatcggctctctggggggactttgtccgttggtatgtcgttcacagcccttagtattgatttaccgacgcatacgatattggccgtcagcttctatctgacaaatctgccccttgtctagacgacactgaaaaatagtgtgggctggctctctgtgatcgacgtcccgaggtcgcctacgtatctgcacgcctatatatgagctcccaaagactggggattcattcaacgactcgtttcatctatttatcattggatacaccgtagaccgagtgaattcagactctgcgtatcttcaattctgatttggttgattataaagcacatgaggcagactagactggaattacgtattcactttggtgcgattgagagtgcagatatatagacataaatagacgttgcagcccggctcagtataaggttacatggacaggatcctgctcatacccgcgtatcaactcgtgctatccacatcgtatcctttagctcacccgcactataagcctgactcatagcaatcagtccttccgagttagtatactcgtctcttttataaaatcgtcctatagtatgtaaatagaacagcttactcatcatataggtgccatggtctagtggtatgacgacacattgtggtacagcaatgatctgtgttagccccggttcgattccgggtggcgccattcttattttttttcttcccttttctctctcacttttaccaaatagtagaccagtcaaaaccgattttctgctgtagtgtaataatctaagagaaggaaaagccataaacctaagaatatatcagctttacttgatgtagccaaaatttgtcgccatttcatctttccggtgccatggtctagtggtatgacgacacattgtggtacagcaatgatctgtgttagccccggttcgattccgggtggcgccattcttattttttttcttcccttttctctctcacttttaccaaatagtagaccagtcaaaaccgattttctgctgtagtgtaataatctaagagaaggaaaagccataaacctaagaatatatcagctttacttgatgtagccaaaatttgtcgccatttcatctttccggtgccatggtctagtggtatgacgacacattgtggtacagcaatgatctgtgttagccccggttcgattccgggtggcgccattcttattttttttcttcccttttctctctcacttttaccaaatagtagaccagtcaaaaccgattttctgctgtagtgtaataatctaagagaaggaaaagccataaacctaagaatatatcagctttacttgatgtagccaaaatttgtcgccatttcatctttccggtgccatggtctagtggtatgacgacacattgtggtacagcaatgatctgtgttagccccggttcgattccgggtggcgccattcttattttttttcttcccttttctctctcacttttaccaaatagtagaccagtcaaaaccgattttctgctgtagtgtaataatctaagagaaggaaaagccataaacctaagaatatatcagctttacttgatgtagccaaaatttgtcgccatttcatctttccggtgccatggtctagtggtatgacgacacattgtggtacagcaatgatctgtgttagccccggttcgattccgggtggcgccattcttattttttttcttcccttttctctctcacttttaccaaatagtagaccagtcaaaaccgattttctgctgtagtgtaataatctaagagaaggaaaagccataaacctaagaatatatcagctttacttgatgtagccaaaatttgtcgccatttcatctttccggtgccatggtctagtggtatgacgacacattgtggtacagcaatgatctgtgttagccccggttcgattccgggtggcgccattctttttttttattcttttccccatgatcatagaagacagaccagggccgagtaattattaggtaaggcttcttttttgtaagcttttccaggtcgaaagtcatatattaaccagacatcatcacatcgttcactgatgattccatgcaatatacaatgttgtatagagaaatgagggggaaaggagtacggattttgatggggtatggcgggcagaactacccgtaggcggtaggagacaataagccaataagacagcccaaaacagcccgaaggcggtctgaacaccataatctttaacaaagtcctgcaaacaaattcatccatgagtgacatgaggtgatactctgtgctagtgtggaggttagaaaaaaaaattggcgccacccggaatcgaactggggctaacacagatcattgctgtaccacaatgtgtcgtcataccactagaccatggcaccggaaagatgaaatggcgacaaattttggctacatcaagtaaagctgatatattcttaggtttatggcttttccttctcttagattattacactacagcagaaaatcggttttgactggtctactatttggtaaaagtgagagagaaaagggaagaaaaaaaataagaatggcgccacccggaatcgaaccggggctaacacagatcattgctgtaccacaatgtgtcgtcataccactagaccatggcaccaagaggctgaaatttgcacaaaatttggctatatcaagaagcgcatttcatctagtttagcggcagcgaactgataggccttggctttcataagggcctcatttgcgagcccaaaggtaggatcgcgtttcattaacatggtgctgtatctgacattagcaaggcgtattgtctgcgcccgccagtggtgagcaagctgtggctccgcgaaaagaaaaaagaaaaaaacgccgtgttagctttgaagcttcataaaaagatcacatattcaaggagtaggtcacctttcagaaacttcttgtgcatagtatgtaggtgagtgccgaaaggggccttcgctgttcaggaattcacaatcggcatccaaatactagaaagggtttgaccagaatagtctcatgcaatctttgataatgatcatcgatgcaaagacacgcagaatgttgtaccgtatgttaggcgggggctgtgagaccgttctgtcgaagtcatcttgaacaacccaaccttttaagctctcaatgacatctttttttgctcttgagataagctttcacacctgcttcttctggttttgttgcaatagtatgctgcccaagattcacactgtaacgtttgatggttgagttcaagttcccattgggccaaggggagttcgggccagcattcgtaacatccgttcaggaactgtcgatcatttcggagagaacggatattagtccagcagatttcaagcgcatccttcagctcaatacatttttgttgctcttcaaatgttagagccggtttgacagagtcttcctcatcttccacccaccaaggaatctctccattctcccttttgatcattttgatcattttaatcatttttccttcttcttcttcttcttcttcttgtatgcgattccacccctaacatccatctgctgaggtttaggtcagaattcctagtcgggctttggaataaagatctcacagtcttgatgggggatttcaccaccggcttggcaacttccttcagaactcttttgtcggctttactagacatggttgaggggatttcgaaatttctggagatatggtaagaaagaagcaactgccatggaagcgtagaagctatctaaaaccgtggtgagatcaagacggtttggtttctttcaaactcgtaatgattttaaatgatacagggctgatcccggagatacttttctttgtttaaaaggggcgctggatacgccactgcaaggatatctgtttcttcccgtctgttatttgcaaaccagctcttcgctttgttcccaaatggattttcttctttcttcttttatttccggtcatagacgagatatttgagaagcactagagggtcaagagtccctttgaaagaaagcagaagtgaacaaatgggaaagtgtcatatgtcatctcggcccaatttccaacagaactactacggctccggttggtggttggattattatctatatgcctggcccaagtagatgatataatctttctgtgatttcttgaaaacatggggcgcatagatcgacgatggtagaagtcacctctttttggaattgccagataaacacatagaaagtaggtattaaaccatctagaatatcaaagaaacaaagggtttctgcggccatcatcttagaaacaggttaggtttggctcaacgaacttgtcttggaatctgatagatgaggtgggttgaaacaagcctaggtttcgcttctcacaaaatggttgattcataggtcacgacttaaatggagaattccagaaggtcactcgggtgaatccttgttgccgtattctgtcaatattctcaacatcagtgccttcggtttagatatgaaattaccaacttaatttgtagccctaccatgacagcttcctagccttaatttactctatcgacccttatagattgctctagtctttgctctaatctcctagtcatctgcatcgcggaagctaatgatctatgtcgaaggttatacatagaaaagtcttcacaatgctttttctgccgtctacctcaaaaaaaagcagtatctaaaaaagatctacatctgaaaataccacatagacagaggccgtattcaaacgagtaaatgggtactcaaatgtcattgtggggtaatttaggtataaaaacgccttccctacatcaatttcctaattagggcacgccacttgatataaatctgctggttaatcaaaatgtaacataggaccctgaaagacggcagtacggtaaaaaaagaagaattggagattggatgctgtggggtgatgacgacatataaaaaacgcactagtctggcgtgacgatcccaattaatataagtagataggaagtaccgaggctgtaatccggcaagccagtaaaagtacgccagcccgcacgagagtcactcgggtggctttgggtctttcggggtcttgaaacacgggaagctgaggaagtcactgtaaccctacgatgtatgtatacctacgatctacataaaggattccagagttggcggcattttgcgagctgatcggaaataaacagtacagcactagacaagatgaaatatataaatcatcaacatctgctgctcaaatgcataacctccccaaacccactggatcataattccacaagttcaactcccaaacgccagcatgtcgttcaagctcctgcttgccaccctcccagccctggcatttgctgcctgcaccggtcctgctgtcaacaccaacggccttgatctaatcaagagctttgaatccttccaagcaaacgtgtacgatgatggctacggcaatcccaccatcggctacggccatctctgcagcgactccacttgctcggaagtgacattctccaagccattgaccgaggatacagcgagccaattgcttgccaaagacctagtggtaagtctctacaagcactcttcctccctaaaaccccactatgtaggtatctaatgaatgtactaacccggaaaatagacctaccaaaatggcgtaacaaacgcccttgccaccgcggttactctgaacgacaaccagtacgcggcgctcgtttcgtggacgttcaacgtcggcgtcgggaacatgcagtcatccagtctagtcagccgcatgaatgccggtgagaatgtggagactgtggcatctgaggaattgcccaagtggaataaagccaatggggcggttgttgctgggctgacgcgccggcgggctgatgaagtgaagctgttcgaggaggcttctcagaccaaggctttgcctgttggctgttaagtcaggacttgaataggtagactttggctatcttttatcattggaggtagggggcgatgcattcattgttgattaatgaatgcatacatctactttcaatgaagttcgatgtttatcttcggcagctttgtttgttccttcatacttcttccggggttccaaggctgttttctcaagacatttggatctaagatgaagacacaataaaaggggagttgcgtttatattttatatggatatcttcatataacatcagttttcaagtaatttcatataacagtttcctggtctagcggttatgattttccgttaacaaatgccattagctgatgttccggaaaggttctgggttcgattcccagggaaactattttttatttttatttttagataccatgttgctaagtttaggggtgatatacggccgatttgggtctagtggcactctgaactataaagcgatccttccaaggttccaatgaggctgagcttttttccgtcctcaactcacctctgaaccatcgcaacatcctaagtcgacccatcatgtcgctacttcgaaagccgctaaagcaatacccttggcttccatggtccattcgtaacatctatgactggctccattactctgagcccacctggggctatacaatctaccggacgacctacactccccaatctaatgccgctttcccgcgtatggtcgacctcaccacgaagtacatgaagaacggattctacggggaatacgaaccatcccttcgcgaaagatccaatgcaaatgagttcaacatcactccctaggatgaaatgtggcctaattaccagccacaggtcattgaagatacttcccagttcgatggagcatcgatcgaccagctccgcgagcatttcagggccgacgcaattaagcgtggtatactcgatgtatttcctgggtatcgtatgtttattatcattgacgaagaaagtttccaaacgttacaaaacgctccccttccggagaactcgaaatacgaagaggagagacgtcattatgtgaaactcatcgaggcgttggaggtagatctatatgaggattttccagggtggatgaagtgttccctgtcctcgttgttcgaggtatggtcggatatgcaggacacggcttatatgaaggacagttattcgatgagacccgacggtactgatgttttgtgaatttttcatgtcatgtgggacttgaatactgcagtcactatacccaagattcaatagctgcatattgtcggctctgcgaccgagattgtttattgcattgaaccggtagattagatagcctgtgtactcccgaagttacatgctcctcggggtcgtcctcgtcgacgtgcacgaagggggtcctgtactagaagggaggggtcaattagtggagcgtcattaatactatataagtgctaatgctaatggaaaaggtctggttcaagtgacttattcttatcgttatactcctcaataatgtgaatatatggaaatccagaagtattcttcgagttatagtcacagatagggtgaattagtggcttatctttcccttctggtagatatcttgtgtaaacctcctttataagttagattgtatgtactgagacccgatttacaagaaggcggtaaagtggtggaacttacttctttagcctttaaaccttcggtatattaatcctatactttagctttatgtcacgattggcacttgcgggactcatactttcccgttcgggattgtaccgttggtcgttccttcctgttcgagggaactcgtttgcgcagacagtcgtaccttccttctgggataaacgaggatagggctttgcccccgaagggttataaagaccccattgttgtttaacgtttgttttcttttctttccttctacatacttgatattcgatgagcaatgcacttcttttgttagaaagaacctggcacgtcacagggcttggccaattgtattcagatgcatggtacccaaccccaactccaagtatgaaaagataataaggggatatatccacatcaggaatggatggaataagtcaatgaatgtctagaccgaaagatctgcgtaagggagccaacttcatctacagtcaatttgtgcggcggtgtttatttgtcagtgagaatctacttcataccccatatgacgtgacatattccaacgtatgaacctatagccattgccgttaaggccaacgcatcaagagtgtcgagtgaataccaagccctcaaatgtttcagcgggaatatcaaactccttccgttctaagtccgactaagtgcctgcgcgtggcaccccagaagacctccacttgccaagaataaaacctggttagtctggacgtgtagcttcttctgcgagttacattaactagcgagaaaatcggtgtcggcataggaattactcgattcggaacctatacggggtttgatatggagttgagccttgccctcacaacgactctacatgtatatcttccaatggacaggggttaatgctcagcatttactattgtcgaataaacagagattatcaattagtttagtcctacgattcctattaatagagtataatgggacagaagtgacttaattttgttaggagtttacatacgaattgtaggtaccaattgtcttcctattattatgaggttcgagactaaggcggtgtggagggcggtaagccgaatcccaaaaaatcaggcaggggggtgtcggattatccaaggggggtgtcccgttaacaatcccctaagtttatacctatattctactttgattttgtattcttggttttggttttggttttggttttgttaggtcgtaaaattcatacaagtgaccgagatatatattgtcaacatgtatgtgatctggtcattattttttcagtcttgactcttgaagctgtcattagagtcattagattggccagttaatgcattgacatcccttcaccatgctatatactcctccatctttgggggtctcgccagcgagaaccacccaatcttcccccattcaccaccacctccgcaaccattctcccacgcgcccccagaacgtgggcatatcttcctccaccctgagtaccccacgcagtggggacttcactcgtgggtatgggcggccgcggccacgacgacggcgagacttgcccgaggcactgccaaacttatgcttggcaatttggcggttgcacacggcaagctgctcgttcagctcccgttgcatttgctgcaagccgtggtaggtcaccagcagcttgtggaggtcatcgagcgctggcttgcgcttcttcctcgcctggatgggaaatgttagtttcatagaatatcgactggttcaagggaaggtcagggctcacccgcgaggaatcatgctcagctgagcgctttctcttccttatgctcgaaggctgtcttgagtcagattgtgcacgtaggtcagtggacattgggttgagactcaccaataagggctgctcgtactcactcccgctggtatccatgttgtcttgtgtgggggatacgaagagagaggtgaacatgaagagaggatacagcaatcttgtatgattttataccatgagattataggcactgcgtatttgaatagccattgtccttattgtgcaggaagatgacatagggtatcaataagggcacaacaaaaccatctctgattcaccagaaggacaatgagaattcaatagatgataataaatgataacaatctcattggagagggagattgttgcctgatatcaaattaactaaatagaaaaataaagaacaagtgatgaaaaagtgagagattcaccaaataaatcatgaatagtatagtcgagggtagcacatgagacgaaggtaatatcatgctgcttgcgcttccaagcaggtctggatattgaaagtgttcgaaacccttcgtaagagaaaggcagagagagtgtttgacgcatttcgagctctccgatcctaagctgccacaaaagaacacgatttgccatcttcacaccctctactccatgggatcttgtttactcacacctacgtcgattccatagcagccagtcgccccgagcttcttaatcagcaggcttggaatatagccaggattcttcgcatggtacatcgtctctgctattgttgtacggcgagttcagttttgcggatattcggggtttttcgaccgttgcgatgtttcactacggccataaagctccaacacaaggcgagaagaatccaccatatttctactatcagatatacacggtttttggcatcttggcaaagtcctgtgaatcgtgtattattgttgatcatgtctaaaatgatatcgctcaatgacgctcccgtataagttgtaagtctatgaaatgcagagtaaatcccaaacgctaaattttcgctgataaccccgagaagaaaaaaaagaaaaaggcagaatcatgacacatatagaacaggaaaatggtgaaaaatgcaaataactaactagaagctgaacagaccggtgcgctttttgccgtaggggtagacaaccaaagccgcgataaacagcccgactgtgataccgatcgcgacttggatcatgccgaaaccaagactggcaactgaagtttcagagagagagctggaatatgaactagtcccattattttcaaggttctgacgaacctcgtcggcgtatttgatgcccgcaatcagagagccactagaagcaaggccagaggggaccagcacaaatataccaggaagaatggcggtggcggcatggccatgccagagccgactgtacagattgcctagcacaccaatagtgaatgcaccgacggtgttggcgacttccgattgggcgccgagtttggtcgtgctgaaatagttggcgacgtacccggacaaagcgatgaaaaccatgacgggcatctgctttaattttccatggttcacaatggctaggaaaatagcgtagacagccacgaaggggaatgtgcgtgcataaaccgacccatagacatccaggcctgaacacgtagatgcagatgtcgcattgccatccattagcccgtagatcgtagtccccactgtaataccgtagcccaaaaagagggagtagataatggaatacaccatacggatcgaaccagcgatgatctggtgagattgcagctccagactgctacaaaggaccatgaatccagggagaatcagagcgatagatgactgtgccatagcggagaagcagaaaagtggttcggatttaccattgcgggtaaccatgatgctgccaaatgcgcgggcgaggaaggaagtcagaatagcagcagtaacctcaaagacgttggagtagagagttgaccgtggggcgagaacgtgctgcatcagtccaacaatgcaaccgagacagaagatgatgggcatatcgatcggtcgcgctttgaaagcgaacgggccgaccgctgcactagcaaaaccgtaaaccaggaccaagatccatttactgaatctgggcttgcgctgcataatctcgtctagttcctgagttgcctcttcgacgccgataagatcgtgaacgacattcttgtaaacgttgtgtgtatcagcaaggcgaccaaggtcgactccttgcaccatccgtacaagcttgacttcggccgtgcgtgtagtaggatcatcaaaggacatgatcatgcaaccgggcagatataagaattggcccgaaacttccaggaccctggcggtcatctgcatatactcctccagacgatgggtcggcgcaccgtatcgcataagcgcacggcacagctgcatgatataccgctgacgtgcgatgatttctgcgatatggacggtaacacggatctcatcttctagacgggtcttgcgcttgctcttcccccttttcttttgcataccgggagcggcctcaaccgcggcaggcaggctcgccgtgctgaggttcatggaggcattgaccaacgacgaggtggaccgatgggctgacttcttgtaccatttgagcttttccttgcgtggggtggcggcaccagaggccggctgagacgcagggataaggggcgagatgtaacccttcttcggggtggagatactggaagacacctgagtgtcactgtcggagtcatcggtgatgacactttccgggcgcgaagagctcccgctctgggcgacctgaagcttgagcaactgcgacagaatgccgccgccgactccactagaccgtctccgctgcgtaaaggcgctgatcaagccctcgggagttgtctgtcccgaccgctgatatgcgccccgaggtttgcgcttccgtagctgatcctgaaccgcggtcatgctgcgcaccaagcgatgagcctcggcgctagggggcggctcgataaaattctcaccactctccaatgcgtgcgctcggtcggcctcatggcgggcgcggcgggcctgcagctcctcgagtggaataccgctgtcgaagtcgtctgggttgtaagaggcattgagcggctcgccctcatccgtggggcgaccgaggcgttccgtcaagcggctagttttctgtcgcaacagatgaccggtcgctctgaaccggtcgcgggccgaggtcgcccggtccattttacctgtgaaatcatgtttctcggtttcatcaaactcgggcatatgcacattggagccgcgccgggaatgggccggggctggcggtgtgatggttccggatagcgggatttcgttgagatctgactgcggcagtaacggtcgtgacaggggatcggagtcattttcgtttcggcgaagactcatcgagcgaaagcgaaccctatgatgggatcggctcccacggcgtgtgggtggctcgatcccggcattgtattggttgacatcgacggtggcttcacgctcgaggctatgacgatcaccgggattgtcaatgattgggagagggtattctgcgtattcttcacttgggcttgggtgtgggttgatgatgcccgacatgaagggggatttgggtgagctcggtggctcggtgaaagattatccgagagctgcaagtcgtttatgcaaggcacaaggcacaacgaatgggagaaagcaagttaaaagaataatatatgaaaagatgaacggtgaccaggagagtaggattaagaagaaagaagagttttttttccttttgataaggctagaacaggatcaaatggcgaaaccaaggaattgccaatctaagaattccctcaatgcggatttcagttcgggtcttggatagttaaaatagttaaaaaagacttcaaaccagggagtctagatcttctagataatgaaatcataataatacatagacttatatgcacatcttctaccatggcctttataggctcaaccctaagtccacccgctgtttaaccctccaactgcacatccatggatatatgcacactggcatgtcccctctctcattcggcaattctagaattggaactccgtagagtacgtacaacctgcgcatcagctaggtggtgtgggtcatattgtggcgatcttgttgtgtccagtggtattgacaccgagccatccgggctaaagtgtttatgtatggttcgtgcatgttcttatatatactttatataaatgctttgtgaatgggttccttgccctttccttctgttttcgtccttatctttggcacacacctagagacttcaccccttaggccgcatttgatctgcctaaaacgtcgatcttgacccacgtcttgggtgtagtctgctacttcgcagccacctcctgagatagagtggagtgaaaaggatccaagtcccttgcaaatctgatgccattatcccctgtgatatgaatcaaaggaaagggttaatcagacagtttgaagtcagatttatagatagaaacatgacccactggaccctcgggattcacgcagaacattacgaatcgccgatagctcacggcccacgccacccggtggagtcaaaatggatggcgcaaatctgtgcggttacacatgattcaatggtttaatctagtgatcgagaccctctaccccctctatcccctctatcccctctatcccacatgctatcttgtacaacacacgcagtagctcttccaagtccccttatctcagctctgaccgctccctgttggaaaaggcccgttcttagatcttggaaataccgctgttgaggtatgctgcgcatggaagccacgctgcccaagggacgaggcaccagaatgtggtccgggctgctgtccacaattgaccagacccggcttcaataaaataaaagcaaggcagttaatgctcgatttgcatacgcagtacttggcatcccggtcaaagaaagattgcgaatcggtcgcatggtaaaagacgtatcccatcaacccatattcataaatgagagtctaggcgcaaagagccagcctagtggaaaatatcttgaagctggttatgtctcatagctttacttgcctatattccctataaagaatcacaagttgtctactccgtacaggtgttcataatcgtaaaacaatcatgaaagcccaggccaaggctatgtggcggatcctctggtgataggggttaccatgccaatgataaacacggttagcctgagcaagagcgacagaatagggcccggtgaaaatactatataaaatatagaaaaaaaaaaaatctcaattctggatgaagtcgtggagatgacctggagattccaatcgtcactggaagaagtggcaaacccccactatgcaaactaaacaaacaccaactagatgactaagcaagggcaagccctcatttagttagcatgtgacagcatgtaacatccattctttactccaccgatacaatttcgaagatgctcggtattgcaagaagcttgtttgcaagcaactgcctgttggtgagtgcggttggtaattatgactttaaaacatcggaagatgtcttcttcctgttcgagtctcgtgaagagggccaggtcaatgtctcggacgaggagaaactggtagctggatggacgaggggcgcaaagctgtaggcctgccttcagctcccccggagagggcccgggtcaggatagtagcattatgaggaacaacaaagccatcgacatagagtgataattcggagagttgcccgttatattgggaaatgtcattcgaagcttccaagtttctggcgtggatgtgctgtttgaactataaaagctcccgggggatgtgcgcgagttgtctagatggcgtcttcaattaatcattaggctataataggataaaaaatgatatagacggcgaattttctgatagcagccaaaaccaataggacctgcgttggcccacacgtttagcaatttagaaatatcggtgaacattaaccgtcggggcttttatttgagaattgtcaattagattgggtacaacaccgagtagacaatgtggagtatactgacacattcagatcgatacgtgtctgtttcacagacagctgcgccgagttcagcccgaagttgatctgtttcgcggcgagtttcagggcccctggtcgctcgtgcatattgatgaaatgaagccgaatgagttgaatcgcttttccgccgtgggttgttcgccacaaagcaagatataaaatgtcgcaggcagacatgaccatcgccatgccaagtagcagtaattcttgatgataacggcgacttttgctctgcttaatctatccatcgctacccaacacgatgcccttacgattgttgtgtctccatggctgggggacgaatcagaaggtaagctaccaacgctgctgataggggaggggtgacggcaatcctaatttgccaatagattttacagtcacaactgagtatgcaatcgcctactacagtggcgaaacacagaactctaatcaaacaggtgcgctcatgcatgagctccaacgcgacaacaccgcgaccttctctttcctcgaaggtgacgtcgattcagatcccgggcctggaattgccggttactatgacggtccgtactacagctactaccgtttcccacgcaccttttcccacgaggacagcgatgagtccgacatcctggaggcatacgagcaactgagtgaaacagttgccttggaaggtccgtttgatggggttctaggcttctcccatggcggcacattggcggctgggttcatgatccaccacgccaagatgaatccaaatgagccggcgctatttcgatgcgcaatcttcatcaattctctcccaccgttccgtatggaacctgggaagcgtcctatcgtagacaagggactggaggggtttatctctatcccctgcgtgcatatcgctggagctaaagacccactctttgaatactcaatggccctgtatcgactctgtgctggaagggattcgacatttgccgtacatgggaagggccatgatgtccccagtgatcggaagaatgtcgccataatcgccactgcaattcgaaaactatcaagtcaaattttgtgacgtcggataccaaaggcatggtctttacttcggctgtgcgacacagaggtaaagtttgggcgaagaagagtttgtttgtagaagagagtagtatatttgcggttgtggaacataacctgttgttgtaatggtatattgcagattcttcgcgaaggcagacaatgtgtttcagatcaagacattcaggacccctgaattttgtttcgccgtggagggttgcacccggatacttacctcgttgcgactggggtgaaaccttcccacacatcccgatgtagattgtcaccgagaacgaatgacactaagaaatcgagtagatagattgctttgatacaggaagcccatttacctggcctgagtagtcccctctcgcttttccctggtatgagatatatgttattagccgacatccagcaaagcaaatgcaactatgtcgtcacaaaccagcgacaaaccctccaaagcgaccgttttgcaagatgacccggcaaacttggcaatagcaattgtgggaattggcttccggggaccaggggatgccaaaaatgtcgagaagctgtgggaaatgattctcacgggtagagaggcatggagcccaattccagctgagaggtggaacagtgcagcattctatcacccggatcatgcccgccatggaacggtaagttatgcatgagatgaatccgaatacttaataacgtgagagtagatcaatgtggaagggggtcactttttgaaagatgatgtatctgtcttcgacgcgccgtttttcaacatgacaagcgacgaggcagcggtaagtacagagttgaatgttgttgggctcatctaattatcaacctaccaggccatggatccacagcagagattgctcttggaggtagcatatgaaggtcttgaaaatggtaggttattgctccgaatgacgttttcgaggctgatgatggtggatagctggcattcccctgaccaaaattatgggcacaaaaacttcctgctttgtagggtctttctctgcagactatacagatctcttacttcgggatcccgagtgtgtgcccatgtatcagtgcacaaacgccggacaatcgcgtgcaatggcggcaaacagactgtcttatttctttgatttgaaagggccctgcgtcacggtagacacggcttgttctggaagccttgtggcacttcatttggcatgccaaagcctccagacaggggactcatcaatagcgattgcagcgggagtcaatttgatcttgagtcacgaatttatgtcaacgatgagcatgatgaagtatgcaagaaattacccgcaaccgggagactagactgatttagtcacaggtttctctcctcagatggaagatgccatacctttgatgaaaaggctagtggttacgcgcgaggcgaggcagctggctgtctcatcctcaaacccctggccaaggctctacacgatcacgacaagatccgggccgtgatacgaggcacaggttccaatcaggacgggcgtactgcaggaataacgctacctaacggggcagcccaagaaagcttgatcaggagtgtctatacaagggctgatctggatccctcggaaaccgattttgtggaggctcatgggacaggcacactggctggagacccaattgagaccggggcaatcgctcgtgtctttggaactggtcgtccgcctgataatcctgtgcgaattggctccatcaaaaccaacgtcgggcacttggaaggcgcaagcggagtagcgggtgtgatcaaggcagtgctaatgttggaaaaccgcatgttcttgccaaacaggaattttgagacaattaacccgcgtatcccactcgacgattggaaactcaaggtttggatgttcgggaaagctaaagattggagactaacgtcagtaggttcaattgcgccctgagccatgggcgactacgggccctcgtcgagtttcagtgaacagcttcgggtacgggggaagcaatgcccatgttattgtcgaagatgcccaaagctgcttatcgagctggggattcaaagaatatgacataatccaatctacagcgactaaatatcataacgagacacctcctagcctgccgcgtggtttatctcgcatattcatgctctctgggtttgatgaaagaacctgtgcacagcagatgcaggctctgagcaatcatattctcgataggggacatgaagttgaccatgaaaagtttctggacgaacttgccttcacaataaacgagcgacgatctgtctttccatggaaggcagccattgtcggagatacgatggcaggtttggcagcctcactttctcagaacatcaaggctaggagcgccgtacgacagccaacccttgggtttgtctttactggacaaggcgcgcagtgggctgggatgggaaaggagctgcttcaggcctatcctgtcttcaaaaggtcgatttcgggtattgacagatttctgaatgacattggagcccctttcacagtggaaggtacacagacaccagacttctaaaggtcccgtacactgacatcatgaatgcagaggagatcacaaagtgtccccaggactcccatttgaaccatccaagtctcagccaaacagtgtgcacagccatacaaattgcgctggtcgacttgctggaatcgtggaatatacatccagactccgtaacgggtcattccagtggggagatcgccgctgcatatgctactggagcactcataatggacgatgcaatgtcattggcatactaccgaggcgttgtggcaagccagcttctgcatgaccaaccgaacagaggtgccatgatggcagttgggatgtctgccgaagagatacagccctatctggacggattccagccccgacagctggtggtagcatgcatcaacagtccatcgagtgtgacgatatcaggtgatacacttgcaattgatgcactcgcccaaaccttaaaagaacagcaggtttttagtcgacgcctcgaagtaggtgtcgcgtatcattctcctcatatagaacaggttgccgagaagtattacagcttgatagaccatatccagccccgaggactggatcagatagcgggagacaagagaggaaggtcggggtcgttcttttcctcggtcactggaacgatgattcctttggaagaattggatgctcagtattgggtgtcaaacttggttggacaagtgaaatttgccaactcgctgaggtctttgtgttttgagacaaatagtcaacgtgctgggaatacagggggttcccgaatacgaaaggctggggcagcccgaaagccttcggtggattgtctgatcgagatcggtccccacgcggcactttctgggccgatcaagcaggtcctccaggcggatgcaaaactcaatgctgccgatataacctatattagcattctgacccggaaggccaacgcagttactacagccctcagagcagtcgccacactaggatcactcaactgccccattgaatttagtgcaatcaacaggcccatggggagaagcaagagtggcacgctacagttactggttgatcttccgacatatgcctggaatcacaccaggtcatattgggcagagccacgactgagcaagatgtatcgaaaccgaacctcgccgcggatggatttacttggtgcaccagacaacatggcatgtccattcgagcctcgctggagaaattatcttcggacttcggagctcccttggcttcttgatcacaggatacaggggaacattgttttccctgccgcagggtatttggtcatggcaattgaagcatcagcacagttgagcaaagacgaagaaaagtttgcgagatacgtgctgcgagatgtggcaatacaagcagccctggtgctcaacgaaacttctggcgtcgaggttatggtgtctcttcaaaagtcgacgcaagaccaagaacagttgtacaatttccatatatactccatctcggaggataacaggtggactgagcattgcactggactggtcgggacacagaaaagtattggcgtttcaggcgacggagtcgaggaaactgatggttatgcgacggtcccgttgggaactgaaattcatggaatatcagtgattgacgtccgtgatttctatgacaagcttcaaaattctggtctggaatatgggccatgttttgcgaatatcacaaaagcacgtgtcactcaagacggaacgtgccttgcagaagtcactgtgccagatacactatctgtgatgccagcatcatttcagcatgagcttttggtccatccttgcacgctggatagtatgttccacaccatttttgctgctctacctccaggtatggggcttgaggaaggacctgcaatccctgtttcaattgaagagatgattgtatcatccagtctcagctgcccggcaggagaacccatgagtatctgtacccatgtgcgcccgatgccaaacaaggacgtgacagcatgcatagtagcagtgaattataacgcgacgcaatttgaaaccgagccaaccatttcacttcgtggcctgcgatgtgcacggctcgagcgtcatgaacccgcgtcgcagacaaaggacaaccgtacaatctatcatattgactggaaacccaatccgagttttatttccagtaagaatgcctcgtttctatttggcagggaggatgctattcaagagccagtccttcgagccgagcatgatgagagtgcagctggcttcatccgagctgcgttaggggaagtcagcacaacggaggcaatgggacttgatccttctcatcgcacattccggtgttatctccaagacgtgcttgaacgaaatgataaaccctcaatatcgttatctcacttggaaaatatcaattccgcccctatgggaaggctcctgtcggtcattggccaaaaccttgcggctattattagacaccaagttgacttttccaccgtcatcaaggacgatcgccttttggacgagttctgggatctattctcagcggacgcctcgtatcaagcagctgcaaagtatgtcagtttgattggccacggaaagccagacatctccatccttgaacttggcgttggcacaggccagatagcggagatatttctacagcatcttgtgacgctcaacgagacagcctgttgcgggaaatatacatttgcccacgaaagcgcttccgtgctggagcatacctcgaagcggctggaggcgtggtcaaaatgggttgagtgcaagcccctggatcttggcaaggatttccccaaacaaggatttgaaaaaaattcatttgacgtcataatcctgcctcatggattgtgtactgctcgttgtgaacaatatgcactcaacaagatccgtgatcttttgagaccatctggctatttgattacaaccaatctcttcgacccaaagaagaatgtgctgaaaaatctcttgttcagtgccttgcactgcttatctgcagacgaattttgtttgggccagggtggttggacaacgagtcaatgggatgaaatcctgcaagatgcgcatttcaccgaggttgatgcctatggggaacaagactccgagaagagccatcagtttatcgttgccagaaagcgaaaagcccaaaagtcgcccagaaaggtttctattatttgcgaaaacgaaaccgaggctgccaggaatctagtcactgcgctcgagaatacttcatgtgaggtgaatgtgatacacatcgataatctggagtgtaaggatcatatttgtttggtcttggatacaccgaactcctcgctgctagcctctcccaatgaaactacattcagcaagataaaagtaatgttttcgcagagtggaggagtcctctgggtcacaaagggagggatgattgagcccgtcaacccaaccgcggctttggcggttgggtttgcaagaacagcgcgcgccgaatccggtgtcaaaccgattgtcacccttgacctggatgctcgaaatcctctctcggaatctcaagccgctgagatgatcgcaaaacttctggttgcccgatttcttcgtgaaacccctgatgaagacacggaatatgcggagagaaatgggcaagtcctgattccacgagtactagagaattcgaaggcgaacatggctatgaacggcattaatgacattgaggctgtattcgagcagcctttctatcaacttcaaaaaactctccgtctttctagaaattctaacaaccccggctttgttggtgattcgcagatgacagaactcccagtcggctacatcggaatcaaagttcaatccttcggtctgaataaatgggatattcagccagaccatcttgactgggaaacagacgacactctcggtctggagtgcagtggcatagtatacaaggtcggcgccgaggtccacggcatcactgtaggggaccgggttgcttgtcttggagctgggactgcgagaagcttttatcacgatcgggcatcagcttttcagcggatcaatgatgaaatgtcattacagctggcttcgtctttgcctctagcatataccgttgcttattatgttgtgaaccacctctcaatggttgagtcaaatgatgttgttcttgtccatgacgctggaagccacttcggccaagcacttctggaagtgtacctgcttagggatgctcgggtctttgcgacagtgaacggccccgacgaaaaggacttgctgagctcgaggttcgggatacctggggagcatgtcttcataagcgggaagggagatatagccaaggggatgttgcggtcaactgatggcaagaaagcgaatgtagtagtcacattccagagcgcagaggataaaatgctccagaattgcactgcgccatttggtcggtttattcaacttcgaacagacaacctcaagacccggctcttatcacaccctcgaaacatgtcgatgtccacaatcaatatatttgggcttcaaaaggagaggactgaccttgccaaccagatgtggtcgaaggtctctcgcttgttcctagaaggacgactcaaagggcctggctttactgatgtatatcatgtttcacatattcaagaggcaatgacggcaatcaagacccgacagcatgttgtggttcatgtggaacagagtgatcttgtgaaggtatagtttatcctaagcaccggaggacgtccatttgcctccagctaatgtgatttaggccacgctccctagggctactcagccattgttccactcagatgcgtcatatatgctcgttggtggacttggtggaattgggagggaggttgctctgtggatggcaaaaaacggagcgaagagtctcattttcgtcaatcgaagtggcctttcaaagtctcagtctcaggcaacagtgaagaatctggcggaagaaggtatccaggtaactactcgagcttgtgacatatccgacgagaccgaagtgcagcgaatgcttcaagatatctcttgtggcatgcctccaatacggggactgatccaggcagccatggtcctcaaggatgttcatattgaaaacatgatgttggacgagtatcgggatgtcatgggcccgaagtattatggcacttggaatttgcaccgacatctccctaccgatcttgacttcttcttgatgttatcgtctataagcggcgttataggaaatgccacacaggctgcctatgcggccggcagcactttcatggatgcattcgccgcttatcgaagaaatttaggtcttccaacagtatctttggatctcggaacgattacagatgttggccatttggctgaaaacagagatttagcggcaaagatggaacggcaaggattccagggaactgatacaccaactcttttatccctgatacaagttgcaatttctcagtcaactagcggagcagcacaactcgtaacgggcctcggccgatggaaagaaatggaatcacttgggaactttgatgtgcccctgtttgcccatttccggtacaagttccagggccatgacaaatctactgcgcttgacgactcgatggaaggattaaaggttgaacttgcggccgcaaaaacggtggatcaagctaccgttataatctccgacgctctcagcaggaaaattgcctcgcatctctctatccccattgaaaatatcaattcttccaatccggtctccgagtatggaattgactcccacgtggccgtggagctgcgcaactgggtatcaaggtccatggactgcactgtccccattttggagattctagcaaggtctatgttggagttgtctcataaaattgccagccaaagattcgagggcaagtcggagtgagtaggaaacctttttggtgatcgggaaatagaaatatctatatctagcttctcatccatggagatatattagcgtcgattaatcctcccgtgactttgtaaggagggaaatttggacctgagggatataatggattaaagcggcttagagtcagtctatttgacatcgaagagatcattcttgtcatagtaacctcaggtattgtccaatattcgctctaccgtgcacaccctatgttcactcccacttcagcgcatcctgtccgtcgactgcggctcgcacccttgctcaaagggagcacagtgggcccggaactcacctctactgagaaccaccgtccttcttcttctgtcacgctgacttggcggtaattcctcctcacgctttagtactatctgcctagtagatgggattatgaagtaatctcttgtattgcagagtagtaataaacaagaaacaggaaagaaacaatgtaaccaagagagagatgttacagtttggttgcacgagcccaaaacagttgcatctgcccactatgagagccgggaactggcgatagtcgatccgccagcacaaactgtgactctccacagcccgcttgttcgaagagggagaatatctgcctctgtgaaaatccatcgtgcgagatagtatgcgctgcaggatttttcggatctactagctcatgcatgtggtgatggtggtggttctccgaagaggacggagttgtctgtactccagcttgctcctcagtctcgttcgacacatcgcgcgtcgcccagtcaatgattagaagtacaccacccggtcgcagtctttcggcgagacgtttggtggccaaagcgatgtcttcgacatggtgcaatgccagacaaatagcgaccagatcgaaaccattcagctcctcctcgctgagtggaggcctagtcggtgtgattgtgggagccaggagattaccctgaacggcgaacatgcgcgactcgtcgaggcctagttctgttgcggttgcacggtaattttccagcatgccatctgacaggtcgacgccaatacatctggaaaaatgatggtatagggactagcagaacagcaactgtcagtattgcctgctgcaggtgctaaactaaggtcagtgactcacgcgagaaataatgccatttccgcaggcataatccatcaattttgtctgccgactatctgtggaagactgaacgcctatccagtccacgttgtccgtcaggaagtcgaaaatctgcgtctgtagatcttgaatccatttgtctttgaacacatgctgagaggcatggctagacacggtcagcagtcagaattatttctcccaaggtcctctccgtgcgtcttttcatgggaaatctctctatcgctttacgactcacttccaatattcttgattcttgctggctagtgtctctcccattgtgctaggtatggtcaaggtctcttgtatgaatatggtccgatatcgaagaaggaaggcgaatatggccacgactgcagctgcgcgatatctccaggtgaacattggtgaaaaggtaatgtggcactacaaggtatttatatgacccaactaacatgtgatcagatatttgatgattgaaccttccaaggtcccggggaaaaccatcgcttacaaaacatagaggaggccaggtctgtgttggaggtgtaggtcgtggacaccgattggcttatcccaacagatcaaagcatcaagcccacccggagaatatctcacggctaatcattcagctttcctccagggtccccagccatgatttgttgatggggtggagtatcttcggagtccgtcagagtctgcgactggaccgtatgtagctgaggtcattgtaataatcatgttgtctaagtatcgattactacctcaaagctaccatgagcatcagcatccttatcatcggtagaggataagccgagctgccagtcgacaccagtctcgtgcgccaactgcatcgagccatcattttcactcccggggtttatcgcaaattcctcgcaagacgcatgcacaatgtcgcctcgtgggatcacaagtcgcttgaatttcattgaggccgctagagagcgttgctatcgcggtatgacaggatccaatttgagaatgtcgacataagaaggtctaacggaccaccgaagggatgttttatgccgttgcctcgcgaaagcaggtatggacggggaagaaattagtattcgataagtccgcgatatttcccagatattacgggatagggggagtgctagcacggggagtgtaaggatcatctcatttcctttccttttcctttcatttagttttgttgtttgcatggcacggcagttttcactgtcccttattagcgttgaagaacgaggctgtggattcgctgatcgttggggttgattccaacatcatgccggcgatgtacgttgaggtcaaggcacttggctattcttgcgtacgggataaacaatgcttcaagttctccttcctgcatttcctggtcatcttctcacctcaccgagagcccgtgaagaaggatttccccctactgttacgctgatggctcaggggaaggaatagatgtattatgctatgggtcacgtgggcggtatgtccagaggggtaacacctcctccgtactgtgtaggttatcgacaacgaacacaggaaatttgagtgctaaaataattgacagacgaatattggctatttggggaacgtgatccacagtggtcaacggtgaacactttgggggttgtaataaggggatatactattaggcttcatgatcccccgatgctccaaagtccctttctatcatggatcgtctctccagcaaatctcaaacggcctctcccgagtacaagcccagataatgattatggctcagcatgtttcatgttgccatttcaaatcaaaagtcggtcagagatcaaaagttgtaagtgcatgcattaagttggtggagagacggggtaactaactatccaggctatcgagataccgtcggcatacgtcgacatagccccataccatattcttacgacatctccgtcccatccaatgaacatcatcctcggtcttcggcttttgaccacatttaattcctttaccacgcgtacggagaccgcgtcgtgccaagactccaatcggaggcacgggtgagcgaagatgccgattagtcagcggcttcggtccaaaaagcgcctccgatccattttaagttatcaattgatgactctttacggagtacaggcgctctagagcgaaatgtttgttatcacttggggctccgcacagaagtttcgacgctgcgaataaaaagcaatgtttgcttcggcctcggactttcggggctgtcttggacccctgagactctaataaaatgatggagtccccccaagtatctccatggtctgatcagcctctttcaacgcctctccccctttctcttcccaatcatcatggatgcttccgaaaaaccaccgggcacaaagtcggatgaaatccaattcgataccgatgccatgacgatcacaggcgacgagacttctggcacggagagccctagtccaaaaggcaatggctggagcatgataacgaggctccaggaggagaacgatcgcaacctggctgctggattccgaaagcaggaacttgggatcacctggcaggatctctccgtgcaggtaataagctcagaggccgctgtgaatgagactgttctctcccaattcaatattcccaccaaaatcagagagggccgacaaaagcctcctctacggaccatcctcaacaagagccatggctgcgtgaaacctggtgaaatgttgctagtgctgggccgcccaggctctggctgcacgacactgttgaaaatgcttgctaatagacgaggaggttacaaatcagtggagggcgaagttcgctttggatctatgcagcccaaagaggctaaaatgttccgaggacagattgtgatgaacactgaagaagagatcttcttcccagccctgacagttggtcaaactatggacttcgccacgcgcctcaaggtaccctttcatctgccagacggtatgactgccttagaataccaacaagcatcgaaaaagttcctccttgaatccgtcggaatctctcacaccgaggatactaaggtcggtaatgagtacgttcgtggagtgagcggtggtgaacgcaagcgagtctctatcattgaatgtatggccactcgaggctccgtcttctgctgggatcaatcgactcgtggccttgacgcctctactgcccttgaatggacgaaggctattcgagccatgaccgacacactcaatctatcaaccgtcgttaccctctaccaggctggtaacgggatttacgatctgttcgataaagtccttgtgcttgacgaaggagagcagatcttctacggcaccagggagcaagccagaccattcatggaggaagccggatttatctgccttgaaggctccaacgtcgccgattacctcactggtgtcactgtacccaccgagcgcagaattcgagatggcttcgagagccgcttcccgcgtaacgccgaggcgttgagagccgagtatgaaaaatcacctatttatactcaaatgatagcagattactcttacccggactccgagctcgcccgcgagcggactgaggagtttaagaaaggcgtagctttcgaaacatccaaaaccctgcccaaaaatagccccttcaccgttggcttcgtggatcaggttaagatctgcgtgcagcgacagtaccaaatcctttggggcgacaaagctacatttatcatcaagcaggtggcaacactatgccaggcattgattgccggctctctgttctacgatgcccccgataactccggtggacttttcatcaaatccggtgcccttttcttctcccttctttacaacagcttgctcgccatgagtgaagtgaacgaatctttctttggaagacctgtgttgatcaagcacaagggtttcgcttatttccacccggccgctttctgtcttgctcaaattgctgcggacatacccgtgttgctgttccagatttccatgtttggtctggttctttacttcatggttggactcgcaatgtctgctggagcattcttctcctactggattatcgtgtttacgacgacgatggtaagtagcttccaatttgttcacatgttcttcatctaatcaacatatagactatgactgctcttttccgggccgtgggggctctattttctacatttgatggagcttccaaggtctctggtttgctgatcatgtgtactgttctgtacaccggttatatgatcccaaagcctacaatgcacccgtggctcggctggatcttctggatcgacccacttgcttatgggtttgaggctttattaagtatagaattccacgataacagcgtgattccatgcgttggaacgaatctgatccccaatggccccggctacgagaatgtccaggcacatcaagcttgtgctggcgtggctggagcgatcccaggtcagaactacgtgattggcgacaactatctagcgtcgctctcgtacagccactcgcatatctggcgtaacttgggtatcaactgggcctggtgggctttgttcgtttttgtcacgatcgtcgcaacttcgaggtggcagtcaccctccgactcaggtagcacgctggtcatcccccgtgaatatttgtacaagcatgtcagaaatcagcaaaaggacgaagaaggccagagatcagagaagcgagtttctgaaaccaaggatgagaccccaaagcttgacaaccagttaatccgcaacacgtccgtctttacatggaaggatctttcatacacagttcagacacctacgggtgaccgtgttctccttgacaacgtccatggatgggtgaaacctggtatgctcggtgctttgatgggttcctctggtgccggtaagacaactctacttgatgttcttgctcagcgcaaaaccgaaggaactattcatggttctattctggttgatggtcgtccattgccgctctcgttccaacgctcagcaggctatgttgagcagttagacatccatgaacgtatggcaacggtccgggaatcattggagttctctgccctattgcgccaacctgctgccattccacgcgaagagaaacttgcttacgtggatgttatcatcgacttgctcgagctccatgatctggctgataccatgatcggtactgttgaagctggattgagcgtcgaacaacgcaagcgtgttactatcggagtcgaacttgtttccaagcctagcattctaatcttcctcgacgagcctactagcggtcttgatggccagagtgcgtacaatactgtcagattccttcgcagacttgcggatgctggccaggctgtattggtcaccgttcatcagccatctgcacagcttttcgccgagtttgatcagcttcttcttttagctaaaggaggcaagactgttttcttcggtcccattggagaaaattcacagggtatcaaggggtatttctcacgttacggagcgccttgcccgcctgaaaccaatcccgcggagcacatgattgatgttgtgtcgggtcaactgagccaaggcagagattggaacaaagtctggctggagtcacctgaacacagtgccatgctcaaggagcttgacgagatcattgaggccgctgcattgaagccgcaagttaccaccgatgatggtcgggagtttgctactagtttctgggagcagaccagtctggttttgaaacgtacctcaatggccttataccgaaattccgactacatcaacaataaattcgccctccatatctcatcaggattgtttgtgggattcagtttctggatgatcggtgactccgtctccgatcttcagagtgtgttatttttcgtcttcaatgccatctttgtcgctcccggcgtgatcaatcaactgcagccgaccttccttgaacgtcgcgatttgttcgaggcacgcgagaagaaagccaagatgtactcctggaaagcgttcactatcgccttgattctctcggagttcccatatctagttgtgtgtgctgctctcttcttcaattgttggtattggacggccggtatggcagttgaatccagtaagagtggtagcatgttcttcgtgtttttcctctacgagttcctctatactggaatcggtaagctgaccgaccatgttcatcttgaccccaactaacaaatgaacttaggccaatttgtcgctgcgtatgcaccaaacgcccagatggctgccatgataaaccctctcgtcctgggcgtaagttttctaagttctcgctcttcctgatatctcagctaacaccgcacttctcagacaatgatctccttctgtggcgtcctggttccctacgcccaaatcgtcagtttctggcgatactggatgtactggatcaacccattcaactacctcatgggcagcatgttggtctttgggctgttcgatcgcgaagtcaaatgcaaggagcaagaattcgccaagttcgatccactcaatggaaccacctgtggtgaatacctgagcgacttcatgcagaccattggcagccgtatgaatctcatcaatcccgaggccaccgaagaatgccgtgtgtgtcaatacacccgtggatccgattacctcgtcaccatcaacctgatggactacttctatggctggagggacaccggtattgtggccctgtttgtggtcagctcgtatgcgctggtcttcggtctcatgaaattgagaaccaaggcatccaagaaggcccagtgattgaggtttggaccttcagggggtgtgaattccgaattttcaaaagttcaatgtctagacttggaaaccttcttttcttcctatgcaaatacatagagagtatgtttcatttcttgttctttgcagatagctatagaatctgtgcgtctctactcatttcaaatttaaatatgcatcacttgatcttattgtttctctcattgaatttcatggggaaagccctatatgacagagaaactcataccgagacggagtctaggagttaccccggccaagccccagccaagctccagccatacggagaacgtgcgagtcctctggaaaatcaaagactggtggcagtgatcggcatatgagaatgggatgcaattcttataatacatcgctgttcagccttttgtctcgaatagacgatgctacatctttctacaaaaccgactaagatgggagtttccagccagatatcgcatatcttctctaataaacccaagtaacaaagtttcccatgcagctagactggtcacggaccttgtcggaccttgtccgagccaaggggaagaaaacgcccaagctgaagtcctgaaagtccagatttggcgaaagccatcggatcaagagtacaaggaccgatattcctcctatctctgctaatgatgatcatgcctccaccgtgggggtcacccaccgcacctttcatcgtatcattcccgaggtcatcgccaacgctgtcataccaccagatcttctcgtggaatttccgaaattggatttccccgcaaatcgagtgggccatcccccacgtttctccagaattccggattcacggggtaaatgcgatcttcagagctgtaatatgacatggcacatgccgcttctcacacataaatgagtgccggtcccgggatcttgtccccgttctatactacttacatctgatcaagcaccatggccggaactgaagatgccatcaccgaggcggagttggggatgaagatggacttgagccatgaggaagttgtccatatggcagagttgaccgaggaggagaaagttatcgagaaggcattgcgcaagcgcattgatgccctgatcatgccactggctattctggtctacctcatgaattatatcgatcggtacgttcatctcgtccatgacagttcgtcaacgctaatagaaccagcaacaattacgcagcagcaaagctccaaggtctcgaagaagatctcaaacttgacgatacaaagtaccaaaccggtctctctattctcttcgttggatatattctcatgcaagtgccttcgaacatgctcctaaactacatgggtcggccatccctgtacatcggtttcttcgtctgcgcttggggcctggtatcggcggtgacaagtcaagtctcaagctatggaggcattgtggcctgccgattcattcttggtttggtcgaagcgcccttcttctgtgccattctcttctatctgtctaaatggtataccaagaaggaattggcgtttcgaatgagtattttctactccggctccctgctgagtggcgctttcggaaatctcatcgctgcgggtattctcaacggcctcagaggccaccgaggactttccgcatggcaatggctctatattattgaaggttctatcacatgcgctatcggactggtcatttgcgtcgttctacccgactttccggagacatggaagcttttgtcccccgagatgcgcaaagttgcccagcggcgtcttgccattgaggctggccaggccgatgtggatgaagggggtggcagaagccaggttgaggggttcagactcgccatgaccgacatcaagacatatgtattcgccttggcatatatgtgcatcaccggagcggcgggtttccagaacttcttcccgacattggtcaagactctcgacttgccggaaaccatcaccctggtgctggtggcgcccccctatctcttcatggttgtatattctctttgtcactccatggcctctgatagattggagaagagattctggttcttcatctacccgatcccaatcaccatcattgggttcgttattttcatgaaaaccgattcttttggaccacgatacttctcattcttcttgatggtcttcgtcttcgcccagaatggaactctctattcctggctcgcgagctccattcctcgtccaccggccaagcgtgctgtcggtaagtcatatccccttagtgtgttctattgatcatcaaactaatcgaaacagcctttgcatttttcaactcaattggaaatagcgcttcaatttggaccccttatacgtacctcgacaaagagaaaccacactaccccatggctatgggtgtttgcattgcgctacagataattgctggtcttgcggctctcttcttatacttcaacttgcgcatgctcaacaaacgccaggagcgtatggaaaatgaggaaatgcagctttccgagaaggatattcgtcggctgcaggctactgctgatattgaggggattgatatttccgctgctagacggctgcagaagggattccgctatgtattgtagaagaattctagcagattgtaatttgatttgatattccaattagagtgttttggcttgtatatccatgaaagacgccgattattgtacgacagaggcccattgtgaccaactgtcgcaactctgaaccggacgtagcaaaggaatagagtccgagtggtatgactgtcatatcataggcagtttccagacttgtcgagggtgatgatgctatccaatcatgaattgaccgcatcaacccatatatggtcagctgacatggctctgaagtcattgatttaaatagtctgaacttcatcaccttcatctccaacatctctcccatctctactatctctgaattattcaaaatcaaatatctgaatccgactcagtacattattgcacacagtgtgacacccttcccatcactgatcgacgtaaccccacaccccacacccccaaccaccatgcaatcagcaatttcccgacccattctccgtgtcactaccaatccaactcttctccgatccctctctatcaccccgagcatcatgagtgcaggcgataccggtgctaccaagtcggagttcatgggccagtatggtggcacagtgcaaaatagatgacgtcatatctgacttttggcaggaaggactctttcgccagacgcgaggctgcacacgaagccatgtacattcgacaagttgagatggagaagtgagttacactgcatcaagttcaatatataaacttacctggtggtagacttgagaatctcaaacgaaaggtcgaggagcagcgcaagcatatgaatgaacttgacaaacatatgtggggatatcctgaattttcccactcgagaccaacactgacaggtcatagcgatgagtatactaggtctcagggaggtgaacagaactaggtttgccacttggttgcgagcatttcctgaacggatcgagttctcaagacatcgacatatgccttacaatcaactcaacattcgactaacagtgttataatgattttcaaacctcttttcacgataatttgttagctagcgctattaccacttggaatacaacatcaacttttatgcaggagattcctctctagtctcttaaatctttgtctgccacctccaccggtagctcagacaggcccatctggccatcacgaacaaaccaagtgacactatcagaacacttcccagatatgccaccatggctctcttcccgactttgtcgagcatctcaccgccgatggggatacagatcagtgttctaagttcccattagtgaggaactactactactgacgggatttgaaagacttacgcaatgctaacaatcgaatatgtcaacccgaacctgccgccaacctcgcttgccttagatatctgcccgatgcaggctggtgcaagacttaggaatgatcctgaagccaatccgaagatgaccgagaagatataaagcccaattagggaatttccaaacggcagccagaccacgaacactgcgaatgcacccagagcaatgagtgcagtctgggtgttgattctgccaaaccgatccgccacgcccccagccatcagtcgtccggccgtggatgctctatgccacactagtcagcgcttcgctcgagagaccaccaacatacattaccactcacacgttgagaacagccagaagaacgacactggtattggtagaaaacccctgcatgaccacgtaggttggataaagacctagaccagcgaaaacctcgagctcaagagctaccccaagtcagtacttgtttctattatccggattcccgattgaaagcgacccaccaaagatacccattgtcaaccaggtaaacctcgcatcttgcaaggaacgcaagttgatagttgatttacttctgccctttggaagacgtgccttgaccagagctgttccaaggacagacatcaccagtaccaacaatgccagtaatcgaattgtccacttatatccaaggttggtgaatccggctcttagcacaaacggaaatatcacaccaccaagacccgcgcccgacatcgaaatcccaatcgcaagggctgccttgcgatcgaaccattgaggcacactagctaatgccactgtgctcaagagggcagcaccggttccagaaagaacaccaagggtaagaacaaaatgccagtacagatggctttcggcgagaagaacaaggccagtcacatagcatagagtgccagctataagaatgcccctgggtccatagcgatcaaacatcggcccaacctgtacagaaacactcagaccgaagaaggtgaacagccccggaatccagccgactgcactcggcgaatagctggctagctgatgggaagcgaagtaattctgcaggattcccgtcgtgttcatcacaccgaatgtactcatcaagagaaagaatgaacctgccacaacacaccacgcttgcaaccctccatctgggaatttgtcgtcggtactatgaccggtcagatgagttgtgagtgtggatagctcggccggcggctcgactatggaaaatgccgaccggggagcttcttcgtcgaagtttgcattgtgaccagtgggataactagtgggatattccgaaacgcttgtcgcagccgactgccatggctcttgaactggattttgcacagatgcggtggcagccttttgcatgatgttatttctgggcctcgacagatgatcccgagtgatgatactgagccgagacctttggactgtaaaggaagcagcagaaatgaaaggcaatgcaccgatctcaacaagtcaacagaatattcagaacctaagccatgcgaagatgactcattgcgataaaggtttgtcttagtcttcatgatttcatggtggggtagaagtatacatcggcatccccttccgatcttgaagatggggatcctgggcgccaacaagatatatttcgcttgattattcggagacatggagctagcccgccttcaattgctccaatgaccgcagtggatgttgcatttctttgattctagcaatgatacctacgaaatatccatcggctcccttcccgacgcatggatagtgagcatccatgaaaaggggaatccatgaacaagggaaatctccgtgagagatacatatataaagatatcgctctggggatatgttcatatatgtccatatattcttctttctggagtccataggtatctcggagacaccacccgatatgtatattggcgtctacctcttcacggggaacttgtataaaatagtttctcccaattccaatcttcacaagctggcaatcgatccttcttaaacaaaaagacgatgatgtagagtgaggttgaagatcggtggcatgacacttgcgccacccaaccccccaagatgccgcgccaaatatcccgatttcctccactggcacttcacggcggagtggcatgatttgcaagtaagccaggtgacgttgtaatcatttcgtgaattgcaattgtcgactggcgagcatatatttattcttctcttcaacacatcgtccaagatctccaattcaacaactcaattgatacctccattcacaatgtccgcagcacaatgcaccaggctcatcgccagaaacatccctcaagttcggcgacaacgccaactaccaaatcctcgcgttactctggttggcagtccagccccaagtcgcaaccctaccattgactctgaagttctaccatatcgactctacgaactctcactaaagaagattcgaaaagaggcccacgctgctgagcccgatctacgccatgtcattgccggcatcacaatgcaaaaagtggtatccagtgccgtgcatgatgatcttctacaccgagtcgacctgatcgaaaatgcaaaattacctacaacactacccatcctaccgggcgccgatgagccctgggagcatgaagaagtcgcaccgaaccaaatatcaaatccgaatgcgtgggatatggaatctcttgaccaagcgctttgtgaaatggaacgcgctagcaagaaagggaatattgcaaaaattgtttgttttcagttgatcagtgagatgtaaaagtccagttcacattcataccagcttgccacgacctgttcagaagtttgagtgtcgttgaaacatttgttatagcgctatggattttgcttcattttatttatatatccccctcacttagctagcgagacataagctacatgttactgtcatataaaatttacttggaagttagcatttgaatggcgacctttctctttctccctctgaacctgttgtgctatacttcacagcggcgtaacgcgcgggcattctactggtccatatatataacttcaatcaaaggcgagttcttctttccttttgcgtaaacccacattactacttactgcctcaacgacacaccatttacccttgcagacttgagactttactactttgcagaattaccgcatccaaccatggccgaagaaatcaggttgtgtcacacctgcaataaagacaggccgaaggatgcatttcgggcatctgaaggtgcagcgaaggagttctacaaactgtgtgaggattgccgcacgaagtaccggaatgtgggtatatcatatgcctagatgggcaaataattccactcacttatcagatccagagactaaaaaaaaagcagagatcacgattcaaaagggcgcaaggaaacacgcaaggcaacaggggtcgatctcggccgtattatctcgctaagccagcaccccgaactattcccgacgtcagcaactcgcagacaggacttacctctgaaggcatcagtgctgcaccgacaaccaccgtacatggccaagcgacaggttcgcacgcagatcctagccagcacagttgggtcacagttgcaccgcccgttatcgaaagttccgcgcaaagcacaacaacaaccactgtcatcaccatttctaccaccaccaagaatatgatggaaaccaccacagagccagaggaagacaaggagaccgcacacgatggtatccagcggggagatgaagacctagagtcactttcaactgagcccgaatatgagcagcaaagtgaaatcagcgtaggtcctaaccaacgtcccgaattctttggctgtatgcactgcgagaaacttcgcccatggccaatggcgggactgcatatctgtttgttgtgtattcgggactggaagtggtgtgcaaagggtgcccacaatcatgccaaggcgagcttcttatgggatggcaaggaacacgatgagtgttatatgtgtcattttgcggacatctaatacttcttgcccatcgcggagactggatgtgtattttcacatgaagcacctatactttgagtgtatgggagctttcattcctggttttcttcttctccatgtagtatcttggtatcaacgtatacaccatttgagtagattgaaagagtgactggagattgaaatctgatagactagataaagagaaagtgacgggaatatcaaatatatctctttcggggtgtctttcttcatgtctttcgaggggttcgctaactatacacaacatacctagtcaataactggcctagagataggccaagaaatgggtacttgtgaggtttgcaacgtacttgtaggcatgcaaaagaatgagatgcatatattgagatgctaatgaaacaaaattgaaagcagaaggtctgaatgagtttggaggcgctgcacgtgacactcattaaatccatcaacctcggtgatctttaccaactctgcattcacaaaacatttacaatatcgtatagattatcctacaatttacaatcttgagcctgcaggttatgaattttgcctggccttgtctcaattcttcaatccatgacagtgtcctgccagaacttatccaccagggcaatgccaatatccaatcaaaaccactccgttcgggcccagtcagaatggcggagtcactccacctactgacctccacgcacgtatcaaaacctccggaggcgtcgactagtgtggaatctaaccagtgccaatgccatttgagagcaagcagatctcggacgagctcggactcccacatcggaaatctggctcgcctaaatcctgctgtgtcgttggctcgggatgaggaaccctccccttcatccctgagtttcccttgcccccatgatcggtggtacgcaacaatctgtccccgactcacgagtcaggaaggctccgaaccgccagtcgcggtcctgcaaagtctgccggctccggaaagtcaaggtccgtttacccccgtcatcgtgctcagatcgccccaggggtcgggacgctcccgtacccatttgatgcgtcccactggtcgtaacgcatcacgcaaggctaacgtggatcctgctgttagtgtgaccgagtcaagccctgccacgcctgctgtgcccatggctacccctccaaatgcgtgtatgagcatgttcccgacgaagaagctggccccatcagtcaggcggaagagattcggaacttacgggcggagatccgcgagctgagggggagaatagacgacaaacataatggtaaatttgcaagccccgcccactcagtcttttctctagcgtgtggcaaactcatgtggatggagaacaaatcgctgatgcctgtgcaggatctggggtccaggatctccagcgcctggaccagctcgagaacttatttgagtctattcgctctgcaccaagcccgctagtcgataatcttattcgcgatgttcggaatgcacatgtcggcctgaagaagggtttggtccctgttggaccatgggaaggcagggaaggtaagttatgtggtataacgattgctagaaagctacccgtgctgacagcctcagcgtacgaatcctacgattatccttcgcgacattcgtcactctcggttcggaatcgcgggttacttaattccccggtcgaagacttcaataatctgcgaagtgaggaagacgatgacagcgactttgaacgaatgtcacagagcagtggatctgactcgtctggcacgatatcggtcatgagcatgcaaagacccgcagtggatgtgtttgtcgagagattcgtggatgcatttagcccagaagtggatatgaaatctggacgagcgggtgcattgcgggctgcggctgggattcgaatgttctcgccactcatgacagacgcgttcgaggccgtctcggtggcattctttggtcgttctgtgcagaacaagcagatcgaggcgtccggattccgactatacccccgcgtgctacgtgcattgcaggatgcgctggtggatcctgaaaaatgcaaagcagaatcaacactggtgaccgtaactctcttgctggctttcgaggttggtttgataaaacactttttatccctagtcaatactaactacagcagagcgttgaacggactactcagagtggtgtccttgctcacgtccgaggagcagtgcgtctatttgaacatcgtggaccagaaaatcacatgtatggagttgaacatcttttgttcaccgaactccgtccatattgggtaagatcacagacctttcgtaatttcctcctctaattccaatggcttagattggcggtgctctggcagctcgacaaccctcatttctggcccgtgaagagtggaagaccattccatggtcagcaggaacgagtcaaaaagatattctgcaccatctacttgacctggctaccgaggttccgggcttactggcagtatcagatgcctttaaagaagcccaaatcacatctgtcatgggcgcacaagagatggctatcaaacagtctacgctttggaatggaatacgcgagcttacggcccgtttctatcaatggcaccaagagtgggttgtcgcataccctgacgggccaccgcaggaagccgaacaaaagggcgaccagggattcccaatcttccaacgccgcgacctccgcaccggggctactttcatcccaacaaaattcacatatccaaacctgctactcgcacaaaccatgtgtatgtactacgccgtgcgattgattctgtcctcaatcgacactcgaccagaagatcgcgtctcgcccatggaacagtatgacttgggttgcgggatctgtcgctccttggaattttatatcctcactgcgccgggcaacatgatcaatcgtcttgcattccccactcgagtagcgtgggaagcattcccagacggaggtccagagcgccattttatgattgaagtgctgcaactcgttgagaagcggcatgctcttgggctttggggcagttccatgccagagttatctaccaaagaagcctcgtcactgaatcgggtagtcagtagagtggacgcaaatactccccatagacgtgattttccgtagccacgatttaattagtctatatatataagggttgtgtggtccagctgtttcgaaataagtattgcgctgaggcgcagctgtcatttgaatgagtcccgatgcctacatgggcattgttctgcttaccattgaatagtataggggctgtgctccgcaccttccggctatattgccgcggtaataaaacatttgaacagatcacaatatatgaatctcagccgaaatgatgtatccaaagctcatttaccattctgactctgattggatgtttccgatggaactacatcgcattcgccctggctccaccagtgatcggcagcatcgaccactcacagggcgatataatcgatcaacaatcgatagttcgatggagattgaagaaaaaaaggagatctgcgtacctgtagaatcccttataaacagcatgcggcccggccccatgctagataccacacctgtcatacaaaatgccttcactcacgaagttggcgctctctgccctcgcgactaccacagtcgtcgcaacaggaatcaacgatttctcctgccaaagctcatacaacccagttgtcctcctgcatggtcttggagcgacatattatgaggatctgaactacatgcagtactggctgcaaacccaagggttttgcacatatgcccaaacctatggcgcatacgatggcttcccattgcttggcggtttgaaggcaatcaacgagagcgctcccgaaattgccgcatacatcaaggaagtcgtgcaaaagaccggcaaaagcaaagtcgacctagtcggccactccgagggtgctttccaatctctctacgtgcccaagttcgagggcgtcgcccacctggtcgacaagatcgcatctatcgcaccgcctacccatgccactacatttgccagcatttataacctcgcgtacacattcggcaatcagtcgcgcgaagtcgtggccgaagtgctcaataccgtcggctgccctgcttgcaacgatctcggccccgatggcccagccatcaaccgattgaatgacggtacccctattgcgcagcctggtaacagtgtcactatcattgcgtccaaatacgatgagctggttactccgccgtcgacatcgttcgtccacgaggaaggcgtgacgaatcgctggatccaggatacttgcccattggatcctgttggccacattggcgaggcctatgatttgaatgtctggcacttggtcaagaacgtgctgacctcgacggatgagaagttcttgtgcctgcttgggtcaccgggtaaataaaaagcttggggttgtgtggatggatcaattttactatatattactaataataactaatctttgaatgaataatacctatgttatcccatcattgttcggcttctcttgacttctatatatagtatagcggcagtggcccatagtacggactttatgactcaatttgcatggtttgtcttcagagattcagagattcataggcaattggggaatatccctctataacaagcgaaaagataccgggatgttgtgcccatactagattgaggagcacttgttgtccgggtgcatgtagccgtcgacaaccactcatctcatcaccccttcggacttccagatctgtgaagtcagagccccgaagaaacacctcagattgccatacatcactttattcgatctgaaacgattgctgccttaggcaccgtgagtttcttcacggactcggaactttctttctccgcacactatcttatctgcaacgcgcaaggattaaaaaaaaaccaccatgtcagagccagacaagaaacctggctctgaatccaccattcatcgaattcaagagcgatgggacagtctgaatgagatgttcgaaaacaccgacactaagcctgcagagccgacaggctctgccgatgatctcgaggcggaaatccgtcaagcccaagctcaattatcccgactgaagaagcagcgagagctcattgatatcaaacaaaaggttgcagaggaggagagagaattggaattggctcgcactcgactcctggccgcgaccaccttggaacttcccccggccacccctgcttcgactccatccagagccgattcgaagcagaacaacaaggctggtattgatggaggccaaaagaaggttcttgctgcccgatcggagcagattaccgccccagctcctgtgactgaagctgctgatcgtcgtccgtccgaggctaagccgtccgaaccgaagcctatgtccaaacccgtaaacctctcctccggtttgaaccttgagcaattgcgagccctcgccgcagctaccaggtcccccgccgcccaaacggttgtcaagtctgaatcccgtttcagtctgcaaccgtccgcccgatcttttcatcctgaatcatccgtccacgccccaccggtgcccaatgtgccggtatacaacggacgagctctgggagagttcaagaacttctctatgggtctagagcgacacttcgataaatatccggactggtataaggtcgatgagcgcaaggtcacgcgggcgcttaagcacgttgcccttaatatcgaggatgagtggaagcgacacatacgtcacctaccggccgaaaaggtcacctacggcaatttctgtaccttccttattcaccagctccagagcggagtgtacccggatgtcgctaggtcgcgctatatggatagctatcagcgaccggcccagtcggtgactgatttctccaactggatgcagcagtgggtgccgcatttccccaataacgactcggaacgtgaccgcatgcgccatctctttgaacatctgatgaacagggttcgcaacgaggctgataagactcatctggacttcgataactattacgagtttgtcgaatacctccagcgggtggaggattccatcggcagccgcgctgagtctcttggtcgccgggctatcaaccctcgaaagcgacctcgcagccacgactaagcggttcgacctagttgagcgagctccgacgaagctgacatcaactttattttacatctgcacacggggatagatcggaggtgggtggttttcttgctattcaatggggatttgccgtgcaatcttcttgcctttttccgtgtacataccggggcgttgcgaaatctttcaagcaaggtattcgtaacggctgtatcttcattcttcatcatctgaactatctctccgacgtctgtgatcactgcgaatctttcccagtttaacactagatcatctaaagcatacccgcaattctcctggcccgggctctcgccagcgcttcctcgatctgctccttgctcgccctgatagaacgcttcgtccatccattctcttttgtccaaccactagacttctcccctgcattcggctgatccccccagagacccttgtattcctcctcggtgaaatacaacgcctgtcgctcatggaaataagccaagatggtggcgctcgcctcgccgctgcagcaggggcagtaattgggatccccatgagggacgggaggtgccacggtcccatcacggagtcccttattcagcatcctgtagctggtgccgtagatttcgtagatcaggtcatcctgggaaacgtggacaaggcgcactttgaggggcgcgcggtcatcgtgacattgcgatccgagcttcagccagagggtgccgatgtcgttcaggttgccgatcccttcaaagtcagggtgttggacgaagtagccgtattcctgagggacaacgcttgtgagacctggcattaggtcggcgatctcttgaatggctacggccagagagaaggtgtggaggcggtcgatgtaaacttggaatttggagcccatggtgtatgattcaagaattcagaagccgagaggatgtttctttccccttcccttcatgttaatgagactcttgtttgcttgccatttgctgaagccacgtactctttctgtactaccgaatcaaatgggttgcaggtgggaatagaagttgagagggacatggatggtggcagttgcctaatcccccacggactaaggttctccccttccacgacttcggcttcagaatctcatgtgaatagtctctctgtactccaatctccaatatttgtcctatattactttgcagtccgattggagcccttcacagcatatcctggaatatgtttggctactggacccaggaaatatgcaggtgtgctgacccatgagcgtgctcttattgctcagcacttatctttttcatctgaacgaatcgtttttcaggaaacccccaatagaatcacgagaatcacgaggtatacggatgatcgaggtgtttatagggggaaacccccccacttggcgggaccggcgggaatcgaaaagccatcttatctgattcccgactttctctttttatattcttagccccggggcttctggacttcgcaactctttgagagtctatccttgctcttgggaattgcgctctggtctggatttgtgttttggctgtttggcgtgatggacgtgaaatccgtgcctttaccgcctggtcaggtacgccaggtacgccaggcacgccagccacctcatcgatatgctcggtggggattgcccctggctgctgcggtattgattcttttagtctggcctgtcccattaccttcgtggaacgtggttgagccttttgttccagtcacctgggacgaaattgttccttcgcaatcgctggagtaccacaactgcggtgatgagttccaatgcgcgcgactggaagtgcctatggattaccagaggacagatggaaaaggtcgcaccttcgccctggctgttgtccgactgccagccaaggttccagtcacagatccgcggtatggaggcgcagttctgatcaatcccggtaagttgttttggactcgatatgacgatataagcttataacctaggtggaccgggtggaccgggaacaatgcaagcgttcgtggcaggtcgaaatctccagctaattgttgatgcggaggccgacccaacagaaaccggagaagagactggcaacaaatattttgatatcatcggatttgatcctcgcggagtaggatctacaacacctccagtgatgtgtttccctgatcccgtatcccaaaggaactgggagctgcaagtctctgcggaaggcatactgggaagtggatcggattccttgcagagaaattggcagcggaccgaagcgctgaactcgggttgttctgtattcgatatgtcgagtccaggaacagacgagccaatgatgtcctatgtcaatacgccgctcgtcgcacaggacatgctgaccatcatcgaacgtcatggagaatggcgtgagaaggaaggacaacgagcgcagacagctcacaataagtgccatgggctggatgaaggagacacaatcttggaacgcactcaatggcgtcgcggagaagagccattgctttattggggtcgctcatacggtaccctgctgggaactacctttgcctcgctcttcccagagcgagtcacacgagctgttctcgatggcgtagtcgacatggtgaagtactaccaaggaacaggaccgaacgttatttccgacgcagatgccatctttgatcgatttgcccagtactgtaatgaagctggacccgtgggatgtcccttctatatggagggtggtccagactccatcaaggcagcatactgggaacttgaacggcagatcctcaacacctcaatccctgtcatggcatctgcagaacggggaccagaagttgtgacttggacagatatcaaagagatccagcgccttgccatctaccagccactccttaccttccctttcctggcagaaagaatgactgagttgggcaaagggaatgccgttcccatggctgacttcaagcatggtaggcacttcggtgcatgcccttccaacaaatgcagtcttgctggaccttggtcgccagaatgtgctacatcgcaggataacgtgatctacgctatggctgctattatgtgctcggatgccgaatatttgacaactatgaacactgagcagttccaagcgcaatggtctagtcttctggctgacagtgcagctctgggtgattattgggcgcaattgcaactgagctgtgttggatggaaagccaaggctaagtatccttttgcaggtatgtcctatcgtggtctctatttcttcgcagctgaccggcttagggccgtggggcgcctctaccgcttatccgatgctatttgtatcaaatactctggatcccgtgactcctctccacaggtatatactcgctcgtcgctagtggctttccaagctaacttgcccagtgcccagcacatgtccgagattttcccaggatctggattgctccagcaagaatcagaaggagtgagttatagttactcgcggtaatcccatgattcatccctgacatacttgatctagcacacaacactcacagccccatcaatctgcgtggcgaaggctattcgccattacttccaaactggcacactgccagtggtaggaactttgtgccaagccgacctgaagccattgcttggatctccgcatcgtcacgacacgatcagccaaagctttagcccagccgaccgtaagctgtttgaggcattgatggcggaggttcagcgggcgcctctgtttcctctttaaagtcccacaaactagatggaccgcgtaaccaagggttctatccaaccctgaagctaactatcacgatttgatgcattaatgatccagtgctatactagagtttagcgatttgacttggatgtgtttgcagttttatattagctattcttattttccttatcttactcagaatgtactgtttaatctatgccaactacccccaagtatcacaatatcacaccggagtaacgtccgcttgcggagaaacacaacctcggctcaccagccaatccaacatcgttgataatcagcaaccccgcttcgaggggttgcccggcattaagagttgttgaatgactctggaggcagattgtatttattccagtgtatctcgaccctcctcaatacagacgactaacagccatggctcccccaactgccaccgagaccctcgcaaacaccatcagcatgcaggcaccacagtcgtctcaggcggcgggtgccgaaaaggccaagatcaagatgcagatgcccagcatgcctattttcgaggataagatgaaggaacgggaatatttaaagggtcgcctagcagcagcattcagaatcttcggcgataagggatacgatgagggtatgaacggtcctacagcgaaatatcgagttaacaactaaaattcccattaggcgtcgctggacacatcaccttgcgcgatccggtggatccgacaaccttctgggtgaatcccttcggcacagcattcaagctgatgaaggcatcagacttaatccaggtcaaccacgagggaaaggtcattgcaggaggagagaatcggttcctgaatgccgctgcatttatgatccattccgctatccatgaagcacgaccggatgtgaattgcgctgcgcacagtcatagtatctatggacgagcgttttgctcgctgggccgaccgctcgatatcatttcacaggattcctgtgctttccataatgtatgttgtttccgatactcgccttgggaggccccagctaacacaatcaggacttggctctctactcatccttcaaaggtgttgtgctagcagaagaagaaggccagaacattgccaaagctctgggcaacaaaaaggcagccctgctacaaaaccacggcctcctaacggttggtaacaccatcgaggaaactgtgttctggttcgtgagcctggaaaaatgctgctacgctcaactgctagcggacgcagcagccaccggacgaggcggccaaacagtgaaaattgacgaagtcgatgctgcgttcacttacaaaacagtggggaccccgaaggctggctggttcagtgcgaagcccctgtttgatgtgatccacgccgaaactaagggtgaatacttggaatgagatatccacccgaataaattgccggggagattaatattttgtacgtgaattgcaacacgaaacagcgtttgtgtctttattcctaggatcttctctcctatttgttgtagtctacctcgaatactggctattgtcctgctgtcactacaaataggtaggtcccgtcaggcaaatagaaactccatatgcggggcttcggacttgactggcatatttgacagaaattaatgcgtcaatgaggatgtctcatgcattgcagttgactgtgttcaccaatcagcctggtgttaaccttgttttaaggtgaaacattcaaccccgaagagccccggaaggcgctccgcttttagttaattccaccactccaacagcagagatggtttatgtcttgtcggaggagactataaatccaggaagtgttcatgccaatatgaacccaaaccaatcattcttctattttcaagatcccccaggtgcagtgacgcttagcgactcggacaagtacacgtgcaatcttccagctcgtaattatcacaatgcactttaccataacttttctcgctgccgccggccttgccagtgcagggctactggagaccgtcgtcaagagagatgactactggggtggcagtgtctcgctcggtccatccaagtcgaccattatcaatgccgtcacgacgttaatccccggagctgccccagaaactcagaacggcgagttattcctatggcctggggtgagttcccaattttccaaagggttctcttggatcactgagaattatagatgtccaacggaaccggtgacctggtccagaccaccctcgaaagttggcccagcaacgcatggtgcggagcaaccaccggccagtggtgtgtgcgcgccagtgtttttggcagcttcggtcagcttgatggcaccggatcccccgtgagcggaaccgacgaggtgcggattgagtacaatcttgagtccgatggacaaacctggaagcagtaaggatgaattcaatggctagatacgtcaccactgacatttatttgcaggactgttacaaatggccagactggtgcccttctttcaacttactcccacgaatctggaccctacatgcgagggtaagtcaatggcccgaatagtatttatcggggctatactgaccccagttagatatggcaccggaactgagtgtgacgacaactgctcaggaaccatcgcggcgcagaaatacttgaacacggttattactttggcctcggctgatactacctttggctcgacgattgctagcgcgggtggtgccacttatactggactttcatccagtcagggtgggaaggtgtggactatcacgcagattgacattccctcaatggattgagaggctgaggaatttgcatagagcctagtatgctttgatccaaaagagataggttcagctgggcgctgggatggagagtcaagggatgagattatgttgcatgacgcagaggcacaatacatgcaagagcaggcgatatgcgatcaggatagtgtagagtatctctcgcgtgctaattgattggggagagcatctgaagcacccatcgggcttgtgattgggccctctgggaagactcggcgtgagaattcgagaaaatggaatttcagctgtacttttttcatataaagaatagcctggagaaaaccaatcatttgacgaattcatcgcttctataatggctatctcataacatgcctgcgtatatacacttcgtcgcccatactcacccccgataatcaagcagcactttcagccgcacaggaccaggggacgctgcaccaccaataccatccaggtgctttttcgactggacataagcatcaacaaccttcttagcatcgggcgtgataatcgagcatcccttcccattagcctgacagatggacatgccatgcacaggttgattcgaaatctgcgcctgaatagccgaaacatcccatcccgaccagccattattctccccgtcgccaaacccaaactcgccccaggtacatgagtatccaccccattgatccgtgggtagatgatcaccaggcgcagcaccccaggcgccctcagagtcctcgtcaaatgcaacatagcgagtctcaccgggcgcaatagtaaatgtcagagcagagtggccataccatccggtcagcttaccgtcaggcccgaccttgttccacacaaccactgtccagggctcgtcgtttggacccgtgaactgcgccacgtatttgtaggcgtgtgcctcggtcggactgatattgatgatgttgcttccccaggggttgccaacattcccctggtaaaggatctcggttccttcgccttttgggagagtacgtcctccgaatccgtttgttgaaaattggccgttgggtggggttgcggtccagttcactgcagtcggattgtctggctttgggcccgggaggatctggttcactactgggacaccggggaggatttcacttggcagatctaaaaccgcgttgatgggtccgttgtttttgtgtgatggtggagatggtcgcttggcggggacggctttctcttcttctaacgagccctttggtaatgtttctgcaaggagcgttgctttttctgcctttgaaggattgtcgggcagtgtatctctaagtggggaagggctggctcctgggtagacggtgacctttacggtattcgttgctgttttggtgattgtgtgtgtcttgaagatggtagtggtctcctctggctctgttggcctgggagccggggtatttggctgagtgaattgaagttgagcggatctggtgtttgtcggagcagggagaacaggctcaggcttcggttcaccttgatgccaatgctcctcgtatgcctctggacgcgcgaggccatgcacaggatgatcagtcatatatgatgcagcctcgggcctgtttctgacaagtgtgagagtgctgtgaatcgtgttggttggcgcgcagtttccaaaaacggtggtcgtggtcgtgatggtaatagattccaccacaaaatcatctagactggtattcacattctcccaagccatgtttcgcggctccaagtcttcaacaggcggcatcaagcgccgagggtgatggcgatgtccatgtgcaggatggtggatgccagcaaagacatacccgacgaagcctgcaagaaggacgtgaatagacacacgccccatagcaaaatacaaagattaattggcaatagctccggagtggattaggtagttgataattaacgcgatagatcaaggcgtcaatggggttatattccaaaaaaataagagtcgcgctcagttgatcgaatgcatgtcgatggcgcggtgttggcggttgtagttgttgtcaagcaaacacgcgatctggggacaagacttcgctttataaagccctttggaaaagggaaagacctggactgtgtatctggaatgccatcacgcgcttggcctttgaagggcttgaaggggacagtagcagccctgaattccggggttccttggccggcccttgggcattttcgagcaattcaatgagcgttaatgtgatggtataagataagatatttcctagacagcgcgaagagatcaataagaataggagtacctcttgggaaagtaatgttcgatgcgtcgacgttgacgttcaaccgaagtacaagatgccaatttagcccctcgcgtcgcattccggccctgaatcacattcgtccctcctatttcacgcgtaaaagagaatttaagggtattcaataaggacgtaactcattctatttaagcggtcgatattgagtctgtggataaatgacaatatatatttcaatgagtgtatagagaagtgctagaaaggagtgtatatcaacagaatataatggacaaattcttccaacaaaattcagaaaagcatacagtgaaaacataccaaccagcaaatactaccgagtgcctatttttctgctttctttattttcctttcaacgcaagacttacaatgccacttcttgtcccccttccggagagaccatcatgcgcaggaacccgaaacctgggtttgtggaggtccgacatcgaccaactgggtaccagcaacagtagtcacgctgtggtcaatgccgttgaaaacgcaagtagcgccctcggtggtggtttgaatgtgggaaatgctcagagggtttactacagtaattagtgtcttcggttgtttatagcggaatatatagatagacgtaccgatttgaatccattcaccattggatgggaaactctgggtaaactgagcatcggcagctccaatgaaagtgacatgcacttgatcaccatcggggtgatcagtggaaggaggtacaggggatgtacccgatccctggacctggcaagacgcagtaatctgggtctgtggagggccaacatccaccaattcggctccgttgacgattgtcacgctttgatcaatgccgtcaaaggtacactggaccccggcagtgttggatgagatgtgcgagatgctcaatgggttttctaaacaaagttagaatacttttagtccagcgcatgattaacaaggggcataccaatcgagacagtggacccgtcagtagagatgctttgagtgaactgggcgttggcggcgccaatgaaggtgatctcaacttgatgatctctttgtttcactggaatcgcactagcagtagccgcataggcaacaaagagactgaagattgtagaggccttcatttttggacaaaagataattggaagattcaagattgttgagtgggtagttagtagattgttctggctgtgttcacacagatgagcaatgagataccgaagcgctttatatacctttttctctatacctactagacctccaagacaagcctgcagcatgataataacactggtttctaatattagatgatatgtatattcttttccatggtagaccggatagtggcgttaggatgtctaccatctagggcatagccactatgtcggtatacggagagaactttgaaatggaacaccccagatgactgtttcagatgatccaaggtcctcatttttattctcgtataactagtagagtgcagttgaagtccgggaatacaagttgagagtgatttgcatatttatttggtgatatgagtcaaatactcgatgattcattgctcggtgcatgatttacttaattactatataatatgtagttattcagacatgtccttcgaattattgaaagacacagtcaaggcgtcatctatactatataaatggccagttcctggtccgagagaccctgtgaccacccaccccatccccggatttttggattctcaaacatccacctgattgtgtctcagattataagcatctcacgtcttgtttttagttgtttttcttcgcgttttggcaatttccgcccggggcaatgatatttgagttgggtatgtcattgaccctcctttaccttcgtattcttgctgtttctgggttcaatgtgctatatataacctcacccaaccttatgcggagttacgcttgccactgatccgtgatatccttattttttggctactatactgaaaagttatgtctacaacatataagaggtagaagtgggagacaacaaatattcaaccaaccccacaatctaatccaccaatcacgacactccgtccagcttatcaagaatccaatacgcgctaaaccctttctagcaaaagatgcgccgtgtaaccaactggccaatcagatcgccaccggcgcgaaagatttacccaaaagggaaaccaagggggcctcttgcgaatataaatgcatggcgatacccatctttgcagaaaatatcctcccttgaacattatcaagaatggcgagccttcacccttttgacccaatcacaccaggggagatccagttggcggtctccgtcctggaatcagctttccccggtgtcaagctgcgctacaaacgcatcgatcttcaagaacccgccaagaatgaggttgttccattcctcgaggctgagcgccgaggtgaagtgcgcccgctaaagccggcacgtttgctgatggtgctcttccatcgattggacaatgggtctttcttcaaggctctgatcaacgcagacaccaagtccatcgtgtcagcgaaagagctgcccaaggacatccagggtccactggacattgatgaaatgatggaaatcgaggagctctgtctcagccatccagctgtcaaggctgagattgaaaagttgaagcttccggctggccacaccgtctgcttggatccgtggatctatggcaccgaggatgccaaagagactcggcgcttgttccagtgctacatgtacattgtggccaccgaccatccccaaaacaaccagtattcgctgccttgcaaattttctccggtgtttgatggtatcactcgcgaattggtccgtatcgattatctgccaggcggagccgatacccaaagcacagagacgcagccctggaagcaggtgcctactgtgcaatacgcgcatgacttgctggatgagcctctgcgcaccgatctgaagccctacattgttcagcaaccagaaggggcgtccttcaatgttgttgggaatgccgtgtcatggcaaaagtggcgattcagagtgggcttcaacaaccgagagggtttggtgctgcataatgtgacctatgatggtcgcaacaccttctaccgtctgtccttctctgagatgacagtcccctacgccggtatgttctaatactctccttgtattagccccatctaatttattctagatccccgtgccccctaccaccgaaagcaagcctttgatgtcggtgacgtcggcttcggtatcacggctaaccaactgagcctcggctgtgactgtctcggtcacatcaaatatttcgatggatatcgcacggatgcccagggagcaccggttcaactaaagaatgtcatttgcatgcacgagcaggataatggcttacaacacaaacataccaattaccgcactggtgcagcgactgtcgtccgtaaccgccagctcgtggttcagatgatctgcaccgtggcgaactacgaatacatcttcgctttcatcctcgaccaagcagccaatattgagctcgaggtgcgtgcaaccggtattctctcaacggtggccttcgaaaatgagaacggccaaaccgtgccatggggcacgaacgtcggaccaggcgttatggcccccttccaccaacacatgttctccctccgcatcgaccctgctatagacggctatcaaaacacagtttactacgaagacagcgtgcccatgcccgatgatgataataacccatggctcgtcgggtacaccacagaacagaacgtgattaagaccagcggcagtgcatcaaccagcgtcgaccgccatcgcgtctttaagattcggaacgactcgaaaatcaaccccatcacccaccaccccatcgcatacaagctgcaaaccatgccaagtcagatgcttctcgcacacccgaactcatttggctcgaagcgcgcccgcttcgcgacccgtcctatctgggttactaaataccaagatgacgagctgttcgccgccggcgagtttacaaaccagagcaagaagtcggaaggcgtggaagtgtgggctggacggaatgacgcagtcgaaaacgaagaccttgttctctggcacagtatgaaatcccatctaacatttcctgaaatggcagctaactgttcccagcattcggtctcactcacaacccccgtatcgaggacttccctgttatgcccatggagcgtgtcagtgtgatgctcaagccggatggtttcttcactaagaatcctgcactggatgtgccggcttcgaatcagtctttcaaccagtcgactttgcatcccgagccggcatgctgtgcgggttctcaggaacggggacaggtcaagctgtagataatatatgatagagggtgcgacctctgtaaataaatgcccccgcatagaagcgaatataacgaatttattccaatccaatgcacgctttgcagtcctttgtagtgcttctttgtggtgttgcttgtcgctgccgctcatccgcaatctagattatctggtgaggccagccgggctcaaagcaacgatatccccattgctgaagatgcctgtcttcaaggtgttggccgaagcaggaaagtcctatgtaggacctgccttccttcttgcatacagtacaccaaaatgcctcaaagacagcagagctaaggtcactagaagccatgggactggggaattgtagtccatgactgcgtgggaatggctgtcgaagttgtatatccaccttttgcaggttgacttcaagctgagacttcaattagagtggttgagcatgctccaatgaagatatggtgtttgaaaccaactcagcgagttgctacatctcaggtaaaccatccacaatcctgtccaacctgtcagaaattcctctgatagcagcactgacatgtaattatcttatttgctcgacgaagctaggaccggattggttattcctcaattattagtatggttaattataagccttgacacgatacagcccaggtaggtgctcaatagacgcctacgtattcatccagcagggtaattttgtaatatttcgggggctcctcataacgactaaaagacagcatggctaaaaccgagcgctcgaatagatcgacgacaccggattggcccgcaacgagacagtcaatcccctaatctccatatgaaagcaaggtagcattagtaaaccaagcaacgaccgaatgaaatatctagcgcctatcctggatagaaagcttctcaacccactcgttcgccgaaacaacatctgtcctatgtgcaaagaccttctccatcagcactcggtgcagctcctcatcacgatccatgcaacaatcctccaagactgtaacacggtagtccatatccattgcctggcgaacagtcgacagcacagctccactggtgattaagcccgcgacaacgagggactttgcatctgcgcagcgcaaaagcatatcgagttccgtagcgaagaaggccgagatgcgacgcttggtgaggatcacttctccagccacaggggagatagttgggtgaacttgcaccgacggttggccttcgatatattcacagcgtgcggcgacagaggagatagagatgttgtttacgttcttttctggatagccgggacggaaagcagtgacaacgtagataattttcacgttggccttacgtgcaaaagcgacagttgacgccaggcgttcgaggtagggctctgtgttgtcgaggcggtcaattatcccgttttggacatcgaggatgaggaggacggttgccatggctggctatcgatgtgtggagttggaagatattggaaaggtagagattgaacaaagatgagtttagatttaagagagaaaactcaagagaaagttgatatggaaaggagatgaaggtgttgttgttgttaagcggttccggtatcatgagatcccggtaccggcatgactagggatttttatacaaaaaaaaaaaagttaactaacgatcgctcacaatgttgttgaatacatgctttgggataccaagaagtgaaggcatatcagtcgagtcttcgtctcttaaccgcaaactgttctaagggctcaaccctttctttcagacgagcattctctttctctagatccccgcgatccaggattaagtcatctcgatccctctttcgtgctttagacgaccctcctatgcatttattcaagatgtctcggtgttacttgaacgacatgaccgaatcagatgagtgtgaccctggagtggcccgagaagcgtttgacaacccaggggtccggcatggtgtgatggcctggtgattgtgtaaagcctcaggctcactgtcggattgatttccctccgactcagagctgtcgtcgccctctgggatctcttgtgattgtcgtggtgagggaggtgaatactcggaggtagagtgtcggctcatttcctccgtgaatgggatgacgggtaaaggaacacttgttcgaggtgtggcccgtgttctcgagactgtccaaggagtatcattcgagtatagacggctatcgagaatggaggttctatcctcaggcgcggccgtagctcgattcccttggaggcagttgcgaagacggaattcatctagcggcacaaggcagctttgacgccaaaaatctgcagcttcttctgctcgcttagatgaagctacctctccattgatccattatgcaaactcctccacgtccagtgtgatggcgttctcattgttatcggagaatctctttctcatatagtcagtatagctcttttgcatcggcccaaaagcgatgttttcgattgggttagagaaccgttgatcgttctggggaaaagaaagacaagcgatcctgttttcccgacagcacttttcgaactccgggaagactatgcgaaatcgatgggaaatcagcagaattctctatgcgtcacgccgacctccgggtcgggtctttgactggaagacggtcttcagccagtcaagtgcatgatccgcctcggcccagcccgactgagtgaaagacaccttgattcgaccaaagttcttggtctgcggtggatcttggcttctgcagacaatgtacggaggcaggtgctttcctcgtgttgagcagcaatgcataacagatgagaatgcccgttcctctctcttgtggttttagttcgttggtcgaacgaacataaggcttgcctttcgataaatggtggtaataaatgcggcatcttccatagtatagatattgtcgttggaaacctggaatcgctgcttgatatctttaaatgcttgaaagaacttccaggctcttcgatcttcatgtggacctttctgtttccgtgtgtttcgctctttggctatgtaaccagcaagttcttgatgacgcaattagaacgccttctgccaaccgacgttgaggttgggtctgtaggtcgtgtagttgtggagatatgcattggctgtatcctttgccaagatgttataaggaaagaatccatgattcaaccaacgctctatccgctcaacaactgcattttcgtcctcgacaaagagagccggcggagccatgacaccagcttctttcgcagatatgcacaagcaaggtgtgtgtggcaagtgagatggaggcgcctcaaaagcgtacccaatattttggtctgacgactaagacggggcggttgaaagagacgcactgcgaagttcaggcaagaattggcctgaaagtctgacggagaaaatttgcactggaagtgagctctagggttgtaaacattgcccaagcctccacactgctagcccagcaaattttccggttcatatcattagattgctgcatttcgtatggctattcgagctttttttcttcaagaagtgtcaatctgggaataaagtggaatgatgctattccactccaggccatagtgacatttatccacccgtgtgaatattttcttttggcttctttttctcccgcgtaattttcccgtttggaattctgttgaggcagtgcccagagactggataatttgaaagtcagttcatgaaataaaatatcatggcaggtgttcagaggtcgtcaattcgtttttgaatggtcgcagtttactacatggagatatgaaattgaagcagcttttttagtacacatgtttcaggagggcaacatgaaaagaacagacgtggaaggacaaaaatacaaagaaacaaaagaaaaatggaaataatgatgcgctggacgttcatctgaactccagagaacctcggtgcaacgacagaatctcgtattcaacgagtccgtgatcttttggaagacgacaatggcgacgattgaatggtctcctcgagcttccagacgcaactagcatagctcaacgtcatttcctcccggtaccgtttcttctcggcggacgataccgtttcgtacctatcaaagcactctctaaaatccggaagcgacatcaccgatggtggtaggaagttcaatttgcgggatgacttgggggttttaagctgccttggtgttcgcgacggcgtgatagggacatgaaaataggagctttcttcttcgctgctcgattgctcgggctcgttctgttccgaatcatgctcggtgtccgaggaattttcagaggcttctggttcttctgggaactcctgggtgggcgttcctcgatgctgtggaccttgcagcgaccgtcgcgaggatatctgctcttggtgaacaatgacagatatgggatcatcgtcttctccaacattgttctcgtctggtgagacatggcgtctcctagcacgaattgggctgttgggctcaacggtttgagatcgaatccggtcgcccgttcgacgtttgatcaatcgtgtacggctaggtggaagcaagcaagtaacaaaccatgcgttcgtacattccgtgctccgatcggggaatccgagttcacggtcaataaaggtcgcaaattgggatggtgaaatggtgtatggacatctctgtcgtaattgtttcttcatatgctctgcatagagcttatcaagggcgttgaagatcccattttcaaaggggttgagatattcactgcctttttttggaagacagagacagatgacatttctttcccagcacgtcacaaagaattcaggcgtcacgggaaattgactatcaatcaacagaagacgtctttggcttcggtctcgttgacctcgctcccggcgcccaaatggacaggtttccttctcaaacacactattcagccaatccagtgcatgcgtcttttcagcccagccactgctattgtacgatatcgtgattcggttttcgtgccttctgggcccttgaacttttgacgttttgaaaatgacatatggcgagagcggtttgccggtggctgggtaacagtagatgacagaggcaaatgcacggttctcagacgatctccggcggcttatgttcaaaggctgcttgtccttttgaattgtagtggcataccccgtgtctgagaggacataaatatgctcattattgagtcgatggtctgatcgaagggccgcaaactgatctatgaattcgcagagcttaccatcttccacggcaggatctttatttgacggttcgcctttctctgccgctcgggaccttttgaattgttcgtgaaagtcccgattgcgagcaaatatcccaccgtgacgactggtaccattgtctgagccaccatggtgcttgaaataggcgctggcgatttctgacaccatggattgctttttcaattgaaatccgtggtccttccatcgttcaacgtagtcaatgatcgctttatcctcgacagctgtaagactgtcattagatgtctgcggctcaggaagtacgccattgccatgtctgggccccagtgcttcggatcttctcctcatccttgccgccatggcgctgtgcgacatgatttctgaccgtatagtgtgactccggtccgcccacgtacatcactctcactgatcgtccaatcaagtcaatgttagaatggcccaaggacagttctgtctgaggcagttgagtgactgggatgtccgaacaacgacgaacagaaattgttcaatgaagttgctgaacacggatttctcacgggaagaacatcaaggcaacgtgggcgttctggacaacctgaaaaataaatgtgagcattgagagcgagcaccggcttataaacactgaccaggtcccaccttgttagctcaacaaaaaaattcggttcaggctggggtacggagtatggatacctcgtctctttttgtttggtcctagattgtcaatatgggtataaagtggatgcgattctacttcgagctagtttccatagtgacaagtatccacataatgtcgaagattccttctggctttgttttcgccgttccggagagtgagtatagcggtgagcaagaataagacagctcgtcggagaggtgcgaactgaaaaaaggtaactgccaggccaacaacgccgaggtgaggaagggaggctctgtgaaacagtatctgcagtgaccgtgtttcttaatgggtggtcatgtttcatgcccaccccggaagttttgggtgtcttgaatattcctggtgtcttcggatttcaaagttcttcggatttcagagtgttcggagtcttgggagtcttgggtcttcggtatccattaaaaagtgagctatgatagacagtgaatatcattggtgaacctggctgcacagcacttctgtttaattctggtggctggcgctgcttaaggaacaataatctgctgataccgccagtcccaagccagcgagtgtgcagtcatgtcggtctggtattccgatcgcattcgttcagatgcatctgcgaacttccgaatccttagctcatatgttgggatatcccaatgagtgatgtcggaccagaattctgacagctgtcgcgggccgagtgcatcccggggagctccagtgtttgtcagcagactgtggtcccgaggtcccactatccacagcggagatgaacgagccattctcgatagaagcagatggctatgagcatgaccgagagcatgaaagcattgatgataatagttgtcacctgtgcatctaagtcagttgctcgacatccaaaggtcaagactcatcgcctgcttacataacaaactccatgacgtcgatgccaaacccatcaaacgaagctcctcgcgcacatttgcgcctttcctatggctgccttcatcattgccaggacttggccaatgacacgtcaacctagttcacatgcaaccactctgctaacctaaaacaattaccatggctgtagcatcagtcccaatcactcacggcggtgacagtgagtatttctagctcaaggatgatgcttagatactgacaagactataggtatgctagactcggtcgcagcgctgaatggtcgcgtcttcgacaccgatcccgtcattacgtacatgctactagacatgtcgcagcaaaaaaggttggcttatctgccgacatactggaccgcgctcatcaagtcagccttgcttaatcgcgcagtgatcaccgaagccgatggctggaaggccgcctctgtcatgattccaccgggtgggtacgttgacaatgcctggactcttctgtgcgctggatttctgggcgtgctgtggaaaataggactcccaggcgtcaaggtaagagcccgatattctcgcagagggcaatcctgactgagctaatgattatctagcgcctttggttcgaattctctggtatgaccgacaacgcgaaaagacttggtctacgtggacagagccagtactactacgttttcagtctcggcaccgagcatgaacatcgtggcaaaggttcgacagccccattcctgactacgtcatactgcatctcttactgatatttgtccaggcctcgccaaagcgatcatgcgggatcaccagcaggccgctcaagccgcgaaccttccgatctggctcgaagcaacatctacagggtcgcgcgctctctatctgtcgatggggtttgaggaaatcgaagagattcggcttgggaagggcaaggtcgctgctgatgctagccctcagcctgatgggccaggagtctccctttgggcgatggtgtggtggccaaccccaactcctgaagctactccctaggctttacaggccttctacttatccgtacgcttattgctagcatgtgtacgtatccaagtgctcatactcatgctcactatgaacaacccgatttattcatatttatacattgtttcatgggcgatataatgctgctatttcaacccagctaacagtatacagcctggctgtttggttgactcgacaagagacaagctcagcaaacactctgcacgctgttcaaatccttaggaataaccccagccttgacagcatctgcaagaagtcagctatcatcgtctaattcttgacgaatggaaagaaaaactcaccctggtaagaccaccggtaatcattcagctgagatttccaggtccagaagatccatccctgctgcttctcataggagtgaacctgcgccgcaaaccactttccatagaagtcggtattcgaactgggctcccaatccgacgacgcctcgatatcatccggcacagaaagactccattcgccgacaatgttgggccagttgctatcgcggttatcaccgcaggaagtgctgatgtagttgtcatgcgaggggctaacactggtatcccatttgatgtaacgatgatcatcataggccatgtaggtcaagtcgtcgagatactcgttgggatcacccgagccccaggacttatccatcgtctgaatatggaggtagtcattcgaatcgacggaaagcttctgctcagcggcacggatacgctgtatattctattagtccatacccgcgacccgaagaccgaaaatactgctcacctcaacagcctgcgggtaatacttcgaccgcatagacgacgccgacgcctcatcctgaacaggctcattgacaatctccaacatgcccacattcctcatctcatccgtctggtagacaaggtccaccatccactcgagccacttgagcgcacgctcatagttgtaatccgtatagaagcccggctcagaagcatactggcccgtgaacgcattttccgcctcctgcgcaccgggcgcaccatgcaagtcgataatgatatacaaaccactgtcactagcccagccgcacaatttcttcagctgatcaagtccaccctgggggaaatgctcgctgtcggcatcaacgatgtcctcgcgcagccagtaaccaaccggcacgcggatggtgttcaagccatagctcaccatctcattgatatcgtcctgcgtcgtccaagacgcccagtggttggcgaaggcggtgttcgcggcgtcttggccgagtgaggaaacgcagtcgaattccgagttctttccgccgcaacccatgccgctccattcactctcagcgatccagggctcgaagacgaattgggagccgaggtttacgccgcggattttgccgttggaggatttgaagaggtttgtgccatctttggcggtgatggatttgttctcttccggtagccaggcgtttgtcagggtggctagggtggtcaaggtggtgactgcggcgaatttagatatcacacccatgatgttcgtttgtaaggggactgtgaatgagattaattggattggagaatggtaagaaagagatggatttcatcgcatataaatagtctctgtcatttcccatacactccacaatctagttcaatcgcatgttatagaggatgtcatgcatgatccacgatgatattggcgtaggatgaaaccgacgactttcctatttgggaaactgggttgagacacgctgcagggtccgggggttgattggcggcagatgctataaatattgacctgcttcctcaccacgatatccacttgagattatccagggtcgctcttaattaatccctcatcctggcggtggtcgatgtttgatcatctccgaacttgctggatttggcaaatgcgggcctccaatgtgtgggccaagatcggcaggcgctacaaccctggggaccgtcggacgttaatgaagacttggtagaagacatcttcgaggtttcttctggttgtcttttgctgtacgttcatagccaagtggtctatcaggttggccctttttgccgttgaagacatcggggtgtccttactatgtaacgtccctaatatcatcgtgggccaagtagatcgggattattaaagtcctacgtcgccaaggactgaaaggcgcataagcatctgactattctgttctattgttcgaaaaagcacttaggccttcatccagcttacacgaagactgtcaagacaacgttgattatcattagagaacattaaaatcatgattgcaatcgctgcaatcgatataagaaaatcataaaatatagcctcctcacagcgccttgagcaattcctggatcaaaggcaagaagcttgtcacgtcatcgatcagcacgcttgtctcgttgacgaacttaggagtaagcagatcatgagcattttccaagagcgcgccaacatccgaaatgacagacggcttgagcaacttcttcacctcgggcaacaaatcgggcacgtatccaagaatctccttgagcgtgctgaccaccttgggggtcaagatgccatcggcgttctcgataaggtctgcggtatcgtcgacaaaggcgggggtgagcaaagtcgtcgcgttggtcacaatgtatcccaggtcggtgatgatggtggtgttcagcagtgactttctgagatcggggatcaggggaatgacgtcgccgaggagatccttcagtccagtgacgatggttggggtcaggaggtcgtctgcgctgtcgaccagaccaatggtctcgttgacgaacttgggggtcaagagggtgttggcgttggacaggagagagccaatggcagagatggtgctcttgttcagaagcgacttcagctccggaagcaaaggaatgacgtccttcaggaccgacttcaacccactggccacctccggagtgagcaggtcgctggcttcgccgaccagtcccttggtttccttgacgaagtctgacgtgagcaagtttccggcgttgttcaagagggcctcgatcgaattgatggtttccttggtcaacagcaacttcaactcggggatcagcggagtaaggtcgctaagaagcgactttagagccttgaccaggtcgggggtgagaaggccgacagcctcggtgaccagagtgttggtatccttgacgaaggagtccgtgagcaacttgttagcgttgccaagcacgttctcaattgcgctgatagtggctggcttgagcaggcccttcagctcgggaatgataggagtaagctgagtgaggagagacttcagcccgtcaaccgtatccgaagacaagagctcactcgcttcatcgatcaaactagttgtctggttcacgaagctggtagtcagcaggctattagcattgccgaggagagtctcgatctctttgacattgcccgcggtgagaagactgctagcctggttgatcagaggaccggcctggctgataagcttgccggtagtcgagataaaggtgggcgtgagcagcttgttggcgttgcccaagagtgactcgatctccttgacattgccctcagtaagaagaccgcttgcctgattgatcagaggaccggcttggttgataagcttgccggtggtcgagataaagctgggcgtgagcagcttgttggcattgcccaaaagtgactcgatctccttgacattacccgcggtgagaagaccgcttgcttggttgatgagaggaccggcctgcttgatgagctggnnnnnnnnnnnnnnnnnnnnnnnnnnnnnnnnnnnnnnnnnnnnnnnnnnnnnnnnnnnnnnnnnnnnnnnnnnnnnnnnnnnnnnnnnnnnnnnnnnnnnnnnnnnnnnnnnnnnnnnnnnnnnnnnnnnnnnnnngcctgcttgatgagctggccggtagtcgagataaagctgggtgtgagcagtttatttgcattggacaagagtgactcaattgccttgacattgccctcggtaaggagtccactggcgtcgtcgatgagagggctggccttgccgatgagattggtggtctccttgacaaatgtggcagtaagcagcgtgttggcgttggtcaagagtgattcaatcgcttgaacgttcttctcggtaagcaggccactggcatcatcgatgagagggccagccttgtcaatgagagggctggctttgtcaatgaggtttgtggtcttcttgacgaaattggaggtgaggaggttgttggcgttgtcgatgagattgtccaccttgtcgataaactgactggacaacaacttattggccacctggaggagagttccaatctccttggtgttctcctcggtcaggaggctgttggcattgtcaatgagactaccggtcttcttgatgaagcttgcagtcaggaggtcgttggcattgcccaccaaggttcggagctggttgtcgaccgggggtgctagaccggtagagagatattcgaaggtgtcggcgaaattacccaagaagctggggttaagcaaactttcaagaccacttagaaggtccccaaggccgccactacccccgagcaaactcgacaaggcatctttcaagtctggcaggatatcagacgatgtggtatcgtcggaactactatcagagctggtagacttggtgcttgaggtgcctgtatcagacgcagcggaggaggtagccttgggggccgaggaggtagtcgccgcagcgaaggagctagttacagcagccgagttatcaacagttccagtcgaactggctgcatcggctgaatctgattcattcgcatcggcaccaagagcggtctttatgccaccgaccacggattccacagggttggccgtggtcgggtctgcggtatctgcaacagcggtggtctcttctgtcgcagccacagatgcagtagccgtgttggcagcattgacggtgtcggcggcagtagtagtctcggctgcgacattggcctgattgacattgtttgcctgagcggcggaggttgtcggggctgaggttgtcggagcggcctcgtctacactgttcacgacaggggtgacggattccaccgaggctgaaggtgcggctggacttcctgtcacattgactgcgaacaggagcgcggtggcgagcgttggcaaaagacgcatgttgtcgaatgagcctatctagctgtcgtttctttggttgataccttgtctaaccagtccaattggcgtcgattccccaaacctatcgttcaaaggtttgttgcggaacaggaagagccttcgaaatattcagaaactcaaccccggagcgagtcatctctttattcgcatttcgatggcactgatcgtcgcgcagcagacagggtcctagctaagcgcaattgcactcatgtgtctttctttgcgtgctccgtacggagtacgaggtagctccatgatcgccgaggaaatagggatcgacaccgaggcagagtagcaatggcctcccatgtgatgggtagtgatgagcaattctcactataactccgctcgatggcagcgtctgaaagcttgctgtcggccgtgcctggggactaggtagtgatcagcaccaaccgggtcaagctaataaatttgctcccgaggtccagccaggtacatgtgtttgctttgcagggggaaggctgggcatccgttaaggtaagccatcgcaaagcttcgtatattggcgtattacggatggacacgggatttccggggcaaaaggccggggcaaaagcgggggatgcattatatttccccacaagtagtcaaaatgaggaacaaggccaatgatggggtggaatggagcgaacgacaagaaattggaagaaaagaaaatgaggggaggttcggacttggggctgaaagaggaaatgaacgacatgtcgctgctcatcgctcatctccgcaagctgagcagttcccagatatcagagttggacatgctattgtcggtttcctttgtattggtatacatttgaaaattaacaagcattggggggttattcatgagaattcagatctcacctacggagtatacataagaaacaatcggcaacaagtacggagtactacaacatatctcctcttcaacgggacgaaagaagttgagatcgtcgagtgtttataacaatgtccaacttggaaagctaaacggtcatctcttgttccctttttgccatttgcttcgtttttattccagatgtccgtcagcctaccttaactctgtatcccatactacctagatctcgatctcttgtcaatgcctcataccttcagcatcaagcgcgtgtccaagtcactcgagcgtgactcaaacgacctagattccagaacccatgtgcgcacctccttctgattggccatgtttcccagtagtctaaacccaaagctagcccccataaactctgaccacgatcatgttgcagtcagtcaggtccccgtggcccgtgggtaaaggtccacgggtgaggagaaggcatgcactcacggagccgcaatctgacaacttccgggactttgtcgcttcagggttttgccaaaacatcccacagttcgtcgaccgtgctcgatgggccatgtgtcatcccaaaggatgagggacatggacactttccatcttagcgaaatcttagcggagaggaacgagcggagctgccccagatactcagcagtctttcccggtcgggttgggggattgaccagcagatctcctctaacggtaccccaggcccaggcacccgctcgacgatctggaatactcgccctcggtccactcctgcacggttgtgagaacgggggaaggtggtattctctttgataaagtgggtgtcgatgacctcatggctaggagattctctcccgcgctccttgagaagaaaccttgagccgagggacagtagcctcgattgctccgtggaggcgcacgctactttcgtaggcaggggacatcggacatccgatgatgacattgagctgtgattccgtatttccttggaatcgggatatttggtagattaaaatgtctcggactggtgattgaaggaatgagggagaatcacaagatagactggtcggttacgatgtgctctgtagcggtgagtcaagggactttccagggtatacgggcacataccacacggattggtacattgggcagtgacctatcgtcgagattaaaatgatccatctcggttgggtagattcagagcctcggattgtaattttaaaagtcggtgatggcattccttcaatggtcatattggcttcgaaatatgtatcgtggtttggagactaatgcaggacagccgagatggaaacttagtagcaagtgatatagtatgtgctataaaaaacaagtgtcgcactatccattctgctctaaccgtcggctacttcaaacatttcatactagaaggaaccgccaagcgttgggcatcaaagttgctcccaagggtttattcctgggctacttgagtccttccaatatttgaaacccccaggattgcaccaactgctggtctaggatactattagttactcaggatagccgtgtttgaaacaggactgttacggagtagtgttaggcgcacggggttcaatgcataggggtattataggggtattagaggagtatctgaaccccaagtatactacatagtatcctgtccatagttcatatcggttcaacccgagatacccgaggccggctccgaaatatgatgccggcagtcccgggtccacctagaaatagatatcatatcataatatcataatagatgcatgttgctacagaagatagacggggtactccgtactccgtctctaccccgtgtcctcaaacaacatgccattacccgagatggtccaatgtcatacgaggcaggtcagcctagatcctccacatcaccccatactcggccaagtggatcaacatcagacgataccttggggacaaacgaacggggataactcggtcggccgaaactacgactccaccgtcttcggatcttctgtcagataagtgacaagccgaggtcagagctgttgagatcgactgacgtgatttgatggcccagctatgtagcagtaccggtggggaaaaggatcggccgaatatcccggcactcgagcaagacatctaaatgggaatgtgccggttctgtgcacttgacttcttcgactttcgactctcgactctcgactttccactccatacaagtttgactgcaaatatccaggaccttccttatatttggaaggatttatatatcgcattcttccccacggggtacgtgagggaaggggtatgtatatagatgctgacctaggaaatcccgaggtattcgacgattgtatattcccgacattccacgttcccacgttcctcaaacgccagcacgggaaaccgaagcaaagcagttacactattgggttccctccgctcatgctggggaacaacatcacgtccgaaacccgaccaaggatattccgcatgctcaacccttccatccgctgcagacctgcattggtggacggcatgttggggctgggttcgagagagggaggggaaggcaacacaagcggggaatatgtggtgctggatgctggccccgtcgaacgattcgtgcgggcgctgaaggcctggcggatctcacgcagggcacggagcgacgaagacagatgcttggcggagtcggtgcggttgttctggtgcatctcatcgtctgcatagacatggtccgctagaaccatctccagcctgtcgatcagctgccaggtctgggggctgtcgtcatttgcaacgagcagaaacgccgatgcaatgcttcgctgcagactgatccaggaccgtgagcagtgggaattgatctcgtgcaattcgacaaacgcatcgattgtgttgaccaggctatcgatgcagtcttcgcggatcattgcacgacgcggtgcgtccaaatgggaatgtgggtcgagggagacgcgacacaagacagagagaagataggaagagtgcaggcgcaattcggttcgctcaatatgctcggctagagaccgacagttgtcgcgataccgcagatgagaagtcgcttcagcgagcatgcgttggatttgttgtttatactcccggatctcatggacacgtaattgagatgatccgggatacatgcgcgaccgcaggacttccaatgacaaggatacaatgcgacacagagtctcgaaatatgagcggtggcccggcattgatttaggatcgaatggaatttcgggctggctgaccatagtgatcgacggtcggtcataggcaagtgagaaatggctgttctgaaaggccatggtccacctaggaaatgtgagctttagattaaccaaaagagcaaactggctacctaccagacgcgccttcgcacttcctgctccgcgagtgagaacccgctcgactcaacatggagcccgaggacaagacacattcgctccgtcatacctgatgttgtgttagcttgaccatctcattggaaacacccccacgtaccaagcaaagtgtatgatgcacctgcattcatattgtatgaaagtacattgctaatgatgagaagaatctgaattacttcgacactgggttgcgagacataattcaacattcgaagacattgatacgcacacgagactggagaaagtcagtacagcacttccgaccttcctagaatgcgacgcaccgtatacccatgaggtcaactcacggtcgctttccgggatgccagacagctggcaccccgatgcaagaaccgcaaaaaggagactgagaaaagccaacggcatcccgaatggtttcactaatccgttggcatcggctttataaacaccccctgctcgtcgtcgattatcgagaagtcgtttcgtatgtcgtcctagttgtgcagtgtctgaaagtactgggtataaaactgcaccgatatcttgataaaacgccaggaacctgacagttggaattagcatgcatcgcagaataccacagatctccggcttactccaaacaccggccgtcttccgggagaaccgcacaaacaccggcgatattgaaggtgaacgggtcagaggtccacaaatccacaaaggggtatgcagccgactcattccccaaagccagttcggcaagaagatcatcctggggcagcgcctgcgctgtgtcctccgactgctttgatttgtccaaaatatcaaccagggccgaccgcgaccccagatgtaccgcgcccgtcttcaagacattcgacccgtagacaccttccgaccgggtggaaccttttggttcgaccggttctggttctggttctcgctctggctctcgctctggctcgggcggcttgtgagtcgagtgtgtttggaagagcgagtgcagactgccgaggatctgttccattgcgaccatcttgttgttaatttcatcccactccgcctgggagatatcaattatgtccggtaaatccggatcggcgctggtgctcgaggggtgatcggcatatgagccatcggttgtgggagctgagctggtatacggggggttcgtgggggaggcgaacgtagactgctgtaatggggtggaggaagcagtggcgacggtagcaggagggggatgtttcgtagaggacggacgaccgtaggagcaggggaagtttcgtttggtgcaattgccgcaggggacgttgcgatcgcagcggaccttgctcgctcggcatgggagacatgtcttgcactcgcgcgggcggcgacggatagggtaagttggcataatgtggattttgtactctttttatttcttcacaatcggatccccgtgatcggcaaaggaattatgggaagggctgcctgcggcgaccgggcaataagagggagcggcataggaagacgtagatcgaggtgagggctgaaaatggacagctctagtgctgaccagtcggaatggcgccaataatgaattcaatagaaacgaccggccctggagcgattgatgcgtccaacagtgcctatcatcggaggtccgtgagctgccccggattgtcctgcgaaacagggaaacccttgggaacaaaataaggaatgtgaaaggacacttcttgacagtgccaaggtatgtggagaattgggattgtcggattgggaggtcggattcaatcttggaaggtgaagggtggaaaagagttgtgaaattgcccagaggcagatgatttcataacccagcggatgttcccgttcgctacggatgtgacctgatttggttgatttgtggatttgttgatttaatatacttcgagttaccttgacataggagatatacttgattactttcattggtagagtcatgtaaatggtcatttctaaagcgaataaaaggtatcactggtacatcataacgactaggaaatcaaacacgtatatgcctctatcattcacgccttagacttcttctcagacacctgcgggaccacccaccagtcatgccaacgaaacttagatccaacctcgggcacagtcacctccaggttgagagtcttatcatcggtagatgtcgcagagagagccttcttgaccgcatcaatagcaagactagttccaatgcaggcacgcatggtgttcttcgtgtcacgcttccaatcctcttcaatggctgccgatttcggttgagttggtgcggacgggtcatcaataaatgtcccattggcaagggtcgcctcccacgccttgcgcgcttcggtgatggctttcgaggcacgctccaaaatggtggcgtcggaatcaccttcgagagctgcctcgcgctggtattcctcgtatggaaccaattctggcaatgtgatagggatgaacggtttcatgcggatttcataccggagtcggtcgctggaatatgcttggggagacgaagcagacgggagcacattgtgccgggccaatacaacatacaatgcatgtagagcaatcgcaaatgcatccaccgcaatgatatgcgtagtcaacctctctagcgcgtggaacgatcggtggaacgcggacgcatgtcgagaggaactcccagagtgctcgtcagtagacatcaagttgcgttttcgtgcagccacagtaaacgtgcgaatgcgatcaatatggccgagatgtgtagagcaaatatgagaaagataccagtacatgcccggtagctcttccggggagtagattgacaactcaaagcccatctggagaatgagtcggaactggaggagcttctggtgataggcccagctactaagtgggaaagaccaggtcggttcgccgccctggaattgcagaggtggttccccactcaaagtgcggagctcgaggtccatttcttccgcctacattaagtcagcattaatactcaaatagcaaagagacacgaggcaggactcacctcgatctgtagattatcccaatcgacgagagtatggcagagtgttcggcgcatgcgacacctattgagacatgcgcatcgcacagtatcaacaaacggctgtgagggttagcaaatgggacatgtcatgatctacatgttcactaacctgggcgaatcgcttcatgaaaccatccatcttccgagcaatctggaaccgaggatcagacggcacttccacttcttcagtgttagcctcgagtaaaatactagcaggtaagacgagttccgcgagctcatcgtgtaagaactctttcacaggtacggtaccgaggatcgtcatgttgctgacaatcaatgcctgaagaagacaacgaatataaattgacggctgtggttttcgagagagcaaagtccatacggcagtctgtaaaacaagttagtgctaggactacactcaagttcaagagtacataccttgaaattgctgggaccggtataatccagcatctgctgcatgtctatcgcatcctggcacagtcgtttcagatgtgtgagcgcgtcatcggaggtaatattaaccatcggacgaggcggcactgtgctagccagctttcgttgaatcttcaagctgaaggcatctggcaccggctttcccagagcgactgtctctgtcagaggtcgaagttgagttatacacgaggcgaaattttccacagatctggtttcaagaacttcaacatcctgatgtagtgcagacaagaactcacgccgaaacactagtctgcaatggatggcatccttgagcttctggtctatgtcagtctgctccgcaacccaggcaaccgcctggtccagcaggcggtgaaagtcggatatattgaaggcagacagaagattgcgattgtataattgactgacaaaatcctcttcctagttgggtggcattagcggcagtcaaagaagttggcgagccagcctactaacctcataataatattcagtggccactcggacatgcacaaaatcacaagctttcactaatgcaagacaataagctctcaagacgaggttaaccaaaggagcatcacttggtacacggtcaaatcgagcgtcgttcatggttttgggcaccggccacagtaatttatcgagataaattgacgtgaatagcgtctgcgatagaggatgtcccttatgccacgccacctgcaattaagtcagcaacctgccatcttcatatgtgcgatattatctcccacctcgtggcatagcaactggtccatcaagccaacgacttcctctggtgtcaacggccgccgtacgtcgtagtcgtcttccagcgcctgcgcaagattttctccgggggctatgtagccactgtccatccttgagtccataatctgtgcgggttcgatcgtcgtcagctgcaattcttgtcgcacgtttcacatctggtgagaaagccgacacacctccaacgcgcccacagcctcgaatagggtgaatgtctcatctttcacgagctgccctgcatttagctctacaagtacaaatgattagacacttaatcgaagctttcgggtagtatgcttactcgctgcggcttttgtgaattcagctgtaatgtcgcggggtgcggactgctcaacgaaccgcggacggcgaaagcgaatctcgttattcggcagcatcgcgaataagttctttccacagtgctagttctattacaggacttcaaacaagtctcgtgctgccggacgtgtttcgagagatcaaatcgagggggaggcggggatgtgagcggaggaaaaagcgagtcgggaagtcgacaaccgggcctagaggtgacgtgcaacatctgaccggccacgcccgggcaatatgagaattcttacagaagttttaactaacagcttatgggtcatgtgaaaacaaagaccagtgggatttctaagctctgcccaaccagacaggccggtattgctacacatgtacatttcaatgcctcccccggaccaaaaactcgctcaagtccgtcacactcgggtcctgcatatctccaagctcgattctctcaggttatgggggaataaggcttatttctcagcagccttggcgatggcctcgttgttggcctgggcgagagacttcacttcaccctgcttgccgttctgttcatcggaacattgtcatcagtcaagattccgcatagagctcgagaggttcacttacatcccacttggcgaaacggaggtccatgactccgcggcgctcagaggcgagacgaggggcttccttcaaggagcggcgcaccgtgcgggcggcgatggccaggtagcggttgtagctggggtcgaggttagcattgattcgaaagagcattggtgcacgcgtacgtcaaaccggcggctttccaggcagcagtcattttgaagagaatgtggaggtatgattcgattgaaggggtgaaaacggttcgggtgagtttggaagcgttcgacttcggaggatcgggatgacaggatcacgtggggagcagtctacctttggaaggcggtggctagaaaagcggtgaggatttacgcggttggaatatttgatgcctataagtcacgtgatattggggtaggtctggtcagggaaagtatttatccgacgtttatccgacgtatattgatcagtactagtatcacctccagggcttcatgtcaccagcgtttatttcgaccacatccttgtacaacgaacactacaccacgccacacaccatgttattctaccccaaaatgcccgatatgtagaaatatattgctattcgccattgggtcaataatacttgcattctgttcttttcatttccttctccgaggtggtggatgtttatatagatccttcgtcacatatgtaatgatatccttatgcaaacaacattatacaatgcgacacactatatcatccagccatacatcatccgattcgtaaagttataatcgctatgctgttggctcatcaataattctattctgtgttcttcggttttttcttcgagggtggtggggtgtagaagggttgtggtgaaattatatagatcttttgtaccaagaggggcaaactgcgtatcgcctccagctcgaatgtaagtctcgcagccacgatgcgtcttcgcagcttcgaagtgctagatcagatggtgtatcagcacatgtaaataggaatatatactccaagaagcaggcttgctgtgcacaagaaggattacaatctgcctgcttttggtgcagggtatgaaaaccttccattcgggttgaccagccgtgtacaatacacgtgcttgacctcgaaaccaagagcccccgaaggcaacaacacaaaaatgtttcaaggcggtccattgcttcagagcatttgctatcccccaccactcctcttggtcaccatatctctcacttgctcttcattctcatcgacattcatccatctcccatcgtccacaacattccccatctttctgtgctttgataccaaagcatctcgaatcgaaggtgcctttttatcatatccaccaggtgagtagcccagttttgtactggttatagtccattggtttccctagcacatccccacttcctaccatagagctattgcttctgtgcatcattggcatgaggtcctgtggcacactgtggttgttgagagctccgctgccatccagtgcttagccacgacccattgcctttgtcgatgatcgggttatgcatatcaatgcccaacatctggcaagttcatctcaattgcctggcgtctgggcatgagtggcacaagtcgtccaacaagttgagaatcttgcaattttcgatcggataccgtcatccccagtacatggcattggggattggtggtattaatccacaattgcatgagaccatcgttggtcccgtgcccttctcagaaatagaggatgttgaaatcgcatgcagcatcaatagggtatcggccatcagttgctttgagcatgggcattctggaaagcttctttgggccacgctctgagatcctgcagtaatggtcagccttgtcactatctgcatatttatcttaacatatcctgcttgggcggtgctcgataccatattccatccaaatgcatactgcaaacccattctcattgtgaacactgtgtgttcactgtgtttgatccatatttctgctttatcggagtttgacagcaatgcaacaacacattggccgtgcccagtcacctacctcacgccccgtccatacattccagattcattttcttcttgtgagcacaaatgctaatgatgatattgtgcagaaggatataaaggactcgtccatccaacatgccgatcaagaaaaaagccggtacccgaaagcgcgacaatgaggcggaccttgccgagctcgaaaggctccggaaacaagttgctgaacagagcaaggcgctagaagctgaagaggcccgcagggaggaagagagccaggccaagcgccaaatcagcagccggcgccaacggacactggttcgctgggatggtaagttcccaatcttgttccgtctttctattcggggatgttgtccaactgggaacatcatggaaagatatactgttgtcacatagacttgtattcaagcagaggatttgccaatggattatgctgacatttgactgaaatagtggataccgacattcggcttctgttggccatccagtatgcctgcaataagctcagcgtgaagattccctggaaggaggtcgcggaagttatgggagagaagttcacggagggtgcgatcgttcagcatttgtctaagcttcgcgccaagcgggaggagcaggataagccaaatccgcctccactgaaacgtgcagcgagttgctataacaagaacgacgcaaacaagaaggaggcgttgtctcctccaaaggacgaaccaccgagcactcgcagcggaaagcgccgacgccgttcgccgtccgttgaggaatccgacgacgatgtgtaccccatcaagaagaaacagcctacaaagaacaagaagaaggacaaggtctccgctgctcctaagctgcgtggagagcgagaacaatccgagagcggtgactcccggaagctgctgtgtgttggagcggaatggctgcgtgacttcgctggcgacgactgtgagattgacgacgaatcggctagttctgaagagaacgagaacgaggactcaactgaaagcagccacgtcactgctcaagcggctaagaaatcaaagatcgtgacactcaagctaggccgagagcgcctggcaagtgttgaccgctaccttggtggctctgcaactttccgggagcctatggcctcaaccaacccgttgcgcgctatcaccaacatgccaccccgtcagccatcctaccgcacttacatgcactccgttgggcctttttcgcctgaccccaccactttgtttgggaacaacatctcttacccatccagtggcccaagcccatttgacattccgatttctgacgctgatcttgctggagcctgtgcttttgatgatgtggatctcacagcaccgtattcacagtttgatatcccctccgaattgcaatttgacccaatgtgcagctacctcaataccagtggttttgacaaccagttcattcccgacgatgaactgtttgcgtccgttcctgacgtagagcctcctcggtactatgggtacgggggtgaagaggtccaggaattttaatttcctgggccgatcgtcatggttcctggttgctctgatacttttcaatacttttccccagtgctttccgaggcttttttcttgtttcctcctttcttggccttttctttgcttttgtttttccttttttccttttctcgctggttggtcggaggagatgggtgagcatcgatcccgatttaacggtgcaactccggataataattcttgcgtggcatggagtcatgtgttatctgaagttgtaccctagcgcttctttcatgcgttgctcgttggccccctgcggggagcccggtagttagttaaatcaataagagcatatcgtatcgtcttctttggaagtaccttgtaggttagtggtgggttctcactgatgataaaagcgaagtcgctaattcgctagtatagaaggttgccgaacaccggatatacgtacggagtagctttccgaggtatatatttgaacacatcggcttggacctatgcatcacgtaggaatactctttcttcataacttttgaatatagactagatgttccaaactaccattctccatcacatttccaatctaataatctgctataacaccacaatatctacaatatttccactgccgatctaggtccgttcttccggctcacgtgatggttctagctgtttctgccgccaagctctggggatgaaggaagcgcctggaaaattttcgagactttagcttcatctctcccccagctttctccatctcttttctttttcccacttcaaacccccgatctctcctgggttgttgtatttctctcttcttttaatccttttaatcccgttgtttccagccatgcagcgcgctctctctacccggacatccgtcctgtcggccgcttccaagcgtgctcctttctatcgctcaacattgaacctccagcagcagcgttttgctcacaaggtgcgttggattgacaattacccgcgggatcatcttgttctgcaattgacaccgtgttccgtccattccgaagcgtttggccgttccctcgctaacagcaactaggagatcaagtttggcgttgaagctcgtgccagcctcctcaagggtgttgacactcttgctaaggctgttacctccacactcggtcccaaaggtcgcaatgtcctgatcgattccccctacggctcccccaagatcaccaagggtaagattcatatcaaaagaaacacttggccactagcaaaaatactaattattccctagacggtgtaactgtcgccaaggccatcactcttcaggacaagttcgagaacctcggtgtccgcctcattcaggatgttgcctccaagaccaacgaggttgctggtgacggtaccaccactgccaccgtcctttcccgcgccatcttctccgagaccgtcaagaacgttgccgctggctgcaaccctatggacctgcgccgcggtatccaggctgccgttgaggccgttgtggaatacctccaggctaacgcccgccctatcaccaccggtgaggagattgcccaggtggccaccatctccgccaacggtgacacccacgtcggcaagctcatctccaccgccatggagcgtgttggcaaggagggtgttatcaccgtgaaggagggcaagactctggatgacgagcttgaggtcaccgagggtatgcgctttgaccgtggttacacatccccctactttatcaccgaccccaagtcccagaaggtcgagttcgagaagcccttgatcctgctctccgagaagaagatctccgctgtccaggacattctccccgccctcgaggcctccaccaccctccgccgccctctggtcatcattgccgaggacattgagggcgaggctcttgccgtctgcatcctgaacaagctccgtggtcagctccaggtcgccgccgtcaaggcccccggcttcggtgacaaccgcaagagcatcctgggtgatctcgctgttctcaccaacggtactgtcttcaccgatgagatcgacatcaagctcgagaagctcacccccgagatgcttggctccactggtgccatcaccatcaccaaggaggacaccattattctcaacggtgatggtagcaaggacaacatctcccagcgctgcgagcagatccgcggtgttatggccgatcccaccacctccgagtatgagaaggagaagctgcaggagcgtcttgccaagctctccggtggtgtcgccgtcatcaaggtcggtggttcttctgaggttgaggtcggtgagaagaaggatcgtgtcgtggacgcccttaacgccacccgcgctgccgttgaggagggtatcctccccggtggtggtaccgctctgctcaaggcctccgccaacagccttgctggtgtcaagcccgccaacttcgatcagcagcttggtgtcagcatcatcaagcgagccatctgccgccctgcccgtaccattgttgagaatgccggactcgagggctccgtcattgtcggcaagctgaccgacgagtacgccaaggacttcaaccgcggatacgacagtgccaccagtcaatatgttgatatgattgctgccggtatcgtcgatcccctgaaggttgtccgcaccgccctggttgacgccagcggtgtcgcctctctcctcggtactactgaggtcgccattgtcgatgctcccgaggagaagggccctgcccctcctggtggtggcatgggcggtatgggcggtatgggtggcatgggcggcggcatgttctaaagcccctgacccgattcccctaaagaattacctcgagcgctcttctttgcatcgtagcctgttctgatactcggatgtttgtgtaatgtcttttcttttgtgtcttatttggtgttcatcttctttcatgttttttccccatacctgtattcttttggacgtgttctgatctccgactctctctctcctctcctctcctccctggggcttgacaaaacaggttcctctgtactatatcatgtattccaataaagtcccatctgatacggcttgctgaattatgtctttttcgggatcgacaatgtccccgcatagatctactgaagctcctaacagtctcgctagaaagtattccctacgaagtacaaataggggaaatattttcacgtaccccatatattagcaacccaactgattggctacgcgggtcggctgttttgtgcagtctatagagccataagaccaaggaagggtctagactgaggcgacgggcgaatacgacttcagacgcgcatgatacacgcaatgatgggaattaatagcgatagagaatatatgttggagtaaaggattccaatagccaacgtaagccgatgtaagtggttgggcaccgcaattaaccatgggtactgctgttcttctctcgggctcttgaatcctctccgcctggaccctttccctcgcgtcaccagatcattccgccattccagtcctgcatttttgtgcattcttgtacctgatctggattcgctctttcaatccaagtttcgttctcttcctggaataccttggccatcgggaatgcataccgcgcttgcggggaacacatcgtgttcgcccctccgtcgcctgtcaacgtaggtacgatcatgactctctgatattctagtctgtcgccaacttgcttttatagtcactgcgcgcttagagagccctgagccaatttgaatcgaaactagactgtgactgctgccggcaatggctgccatggtggatgctcgcctagctctggtgagcgatgcagatctcatgcaagcacgagcagctcttcagcatcagcagagtccagaagtctctgttccccgcgaattcatctctctcatcgtcgaggaactcatctaccgccgcgagtcgcattcctccatcgcggaaatcgaacacgaacgctcaatcctccggaaggaacttcgcaagcacacccacatcaatgaggcattccagaaagaactacgggagatcggcgagatcattacccaggtcgctcatggcgatctatcacagcgggcccgcatgcaccccctcgagatgtcgcctgatatcgctaccttcaagcagacaatcaataccatgatggatcagttgcaggttttcagtcaggaggtatcgaaagtggccagggaggttggcacggagggtgtattgggtggccaggcgaagatcgagggcaaccagggaatttggcatgaactgactgtcaacgtgaatgccatggccaacaatctgaccacccaagtccgcgatatcaccaccgtaacgacggcggttgccaagggtgatttgcagcgaaaggtacaggcggattgtaagggcgagatcttgctgttgaagaatatcatcaactcgatggtcgatcagctacgggaattcgcattcgaggttagtcgcgttgctcgcgaggtcggatcggacggtgtgctcggcggccaggctgttgtgcacggcgttgagggtacttggaaaaatcttacagacaacgtcaaccggatggcatcgaatcttacacagcaggtccgcgaaattgccgatgtcacaaccgccgttgcacgtggtgatcttacgaagaaggtgaccgcggatgtgaagggcgagatcttggatcttaagcttacgataaatgcgatggttgatcggctgaatcagtttgcgttcgaggtcagccgagtcgcacgtgaagtaggaacagacggcacgctaggtggacaagcgcaagttgaaaatgtcgaaggtcgctggcgtgatttgacggacaacgtcaataccatggcgcaaaacctcactctgcaagtccgacaaatctccaacgtcacccaggccatcgcgcgcggcgatcttagtaccaaaatcgaagtccacgcccagggtgagatcttgactctcaaagaaacaatcaatagtatgatggacgggttaggagaatttgcgggggaagtcaaaggcgtggcgagggatgtgggtgtccggggtaaactcggtggccaggccaacgttgcgggatctcatggaatctggagatcgatcagtgaagatgtcaatacgatggcagacaatctgacctctcaggtccgtgcctttggtgagatcaccgaggcggcgatgagtggagatttcacaaaattgattaccgtgtctgcctctggagaaatggatgatttgaaacaaaagatcaacaagatgatctcgagtctccgcgacagtattcagcgcaataccgctgcgcgtgaggcagcagagctggcaaatcggagcaagtctgaatttctggctaacatgaggtatgttgatcgttttactcggtttcataggctttccttttctttcgcttgtgctaactacaatgtagccatgagatcaggacgcccatgaatgggataattgggctttcgagtctggcactcgacactgacgacctccaagctcccgtgagagagactctgaatatggtacacaatcttgcaattagtctcttgactatcattgacgacatcctcgacatctccaaaatcgaggccaatcatatgattattgagaagacgccattcagtcttggtgcaacagtgtttagtgtgctgaaagccctctctgtggaaactaatgagaaggccttgggtctagtctacacagtagatggagaagtaccagattatctgatcggagacgcatatcgactacggcaggtcatgttaaacctagtcggcaatgctatcaaattcacagaccacggcgagatcagagtcacggtaaagcatgtacaggacgacaagtgcgcctcagatgaaacgacattccagttctcagtctcagaccctggaatcggcattgacgaaagcaaacttgccttgatctttgacaagttccagcaagctgatggatcgatgactcgtcgctttggcgggaccggtttaggcctcgcaatttcaaaaaggctcgtttctctcatggggggtgacatctgggtaacctcgcacatgggagaaggcagtacattctcatttacctgccgagtgaagctagctctgccgccgcctagctttgcggaccagcttgccccccaccggggtcaacgcgttctgttcttcgaccacggtcttgcgcgcagcttcccaatagctacggtactcattgagctcggaatagaaccagtcattgtgacagaggagcagttagaatgcggccagttcaaaagtgattgggtctgcactttcgacgcaatcctcatcgaaaacttggagatcgccgcaaagctccgagcctgcccggacctccaacctattccactagtcattacagctcatactgtatccctaacgctcagagctgccggtgaactcggcatagcatcctacatcacagtgccctgccgacccattgatctatggaatggcattcttcctgccctcggcaaccgcccaacccggaccccatcaggctacacacggtcgttatcaattcttttagcggaggataatgacgtgaaccaaaaggttgccgtccgaattcttgagaaattcaatcacgaggtaacagtcgtggaaaatggcctccaagctgtgcaagaggtcaaacaccaccgctacgatgtggttctcatggacgtccagatgcccgttatgggtgggttcgaggccacagggaatattagacactacgagaagctcaatgggcttcctcgtacgccgattattgctctcactgcacatgctatgcttggggatcgagataagtgcatacaggccggtatggacgattatttgtctaagccattggactctagtcgcatggtgcagactattctgaagtgctcagctatgaatcttgccccactgcctgttattgagggctaaaggccactggtatatgggttcactgcctaattgactccgcctcttatttcccccttctccaaccctctttttaactgcctataagccttttatggctgcccagtcgagtctatttcctccgaatgagctcggagcctcatttcttcccaacctccaagaggactaatgtcctaacctcagggaattcccctcctcattctcgcaatctgtacacatatcgattgcttatgcgccccaacattttgcggtggaagcgcagaccttttgaacttctattcttttgaaataccccatcgtgtcggatactctgttaacggttttctttcaaggtgatcaaattctgtctctgttcatggtgtttggttgacacgcgagatgaatacatttaaatcatgtctaatgtctaccgtggtatgccctgtctgttatcttcgcccttatttatgcatctccttcagtacacgaactcatatatgttgcgaatttagaaacaaaacattccgaagcctatttgtctctcttgttgctatggtcagaaatcaaccggtacgttgctatactatgcgtatgcgcaagatataaaagggtatcaaataggcgccgaaaacacaaaatgatacaaagaacatacagactaaacctccccggggcgtctccgatcaaatccagaatttatctcatacttccccttcttgtttcccttccccgcagaaattcgatccccctgccaccgccgccagatatcctcatcacgctgcatattccgcctcccataacccagatactcatcaaagcgtttcctaagcccagagtcctcaggcacgacgtgaataggtattttacctgtagcagaaccccataagaatgatttaatcggatgcaggatgaagtccttcgataggcccgcgccgatcttgtgcattttggatacgatatcgcgtagcgtttcgctgaaggctatgaagagggacaggaagattattgcaaaggatgccggggctggaaaatgtcagttggtatagtcatatagtgtttgagacgaaacggacctgctatttcgaacatttgtcctagggttgggtttgcctgttccccgctccattctcgggcattgattccaaacaaggaggtaaagaaagatagagggaggaagcttgaattgtcagaactgattcttggattttggagagtatgtagacttacacaacactgaatatggtgaagaccatcactgctcgcgattgcgtttgggcaacttcagcttgccaccgagtcatcttggcttcgtcgacatttgcctgtttctgcttgaggtcaaggagcgtttccacctggctggttagtaggaaaaaaaaagacgtgaacggggaacgtgggaactcactgctttctgcgctagatggctgttttctttcatctcattgatttgtgaacgatattcgtcgattcgctcttgtgctgtatcgaggaatgatttaccgcaccctttgttaccgaagtatttcaccatatttttgataacggtgtcttgttgatcgagcagctttaggatggtggatagctcgtcttcgatgtcacgcagctcaagcagaacggatagatcttctcgatttcgacgagcaacctgcaattctttgtaatcttgctgcgcggctgtcatgatcttgccgtctgaggtgcggtcatgatccgctgggcggttggtgaagcctctatttcgaaagcgcttgaaagacttcgtcactgattcggtctgattttgttaatatgatctacccaaggagttgtcacgaagggatgaacctaccaatatgctgattgactcctcgaagattcgcaatacctgcagatcatgattgagagtcttatccaggagaacagtgacagcatgcagcatgataagagcagccaagtcaccggcggtctcaaaccgacgcgagagatccccattcaactcattataaatgctgcgatgcaagttcgactgttcaaaaagcttcccctcagaggtcgcagcctcttgattcggaaagaaagtaacaacagtcttttgatccacaatccaaagccagagctgatcaaccatcaggacattgccatctagaaactcgccaatatcctcgttatcgggatcatcctgtgcagactgcagatactcttttaattgctcatcaatgcgcgccggtctgcgagtgcgcttccaaagcatctggtcgtcgtcacgagcgatagtcgagcgtagattgggatacccatattgatccaatgtgcggcggaaatgtactggaggttcgcagccgagatagctccagatgagttgggcttccaggcttgcctttgagatccggcttgggacgggcttggatcggccctggttgagtcgatcttcgaccaccttacgccgttggattaggttgcgatatgtatcccagtggagctggagtgagttagtacagtgcggaagaagggtactgggtcaattgaaagtactaacgtagggaacctgacaaatatatatgttagtgctgatattcacatcgaggacttgaaacatacatatagagcgagctgaggatccttggaaggattagaaggacgttctgaaatatccatttgtctggagtgaatgcatgcgggcttgacgaaacgtgcatggggctcgaggtgacgagctctattaaaccggttgtaccaattttcgtcattgataaatttccgaacactgcaaaagatagttagcaatgtgcagaaccgtggagttagttcatatgccctacaaattaggctcttgcctatcctcacatgctcggcgaatgacttgggatacccagccagtatgcgtatatggcacatgaatccacatcagtttctccgtatcagcctcaggtcgatcgaagcgtggaactgctcgaggtatatccggtttgtcggcattctcgttgatgtgatcacgaatggactcgggtactgccaggaaagaggattgcactggttgtgatgcagaataggtcctgttatctattagcttacatttgttggttttcggcaagcctcagtggtttacttacgaatgtggctgttcaatatttgtccgggagctgtcagaagcacttcgactgtgggattgcttaggtcgaattaattccaccagcttggtgattgagctctttcgttttagttcctgtggcggatatgggctttcattgggtgcgtcgctcgagtagccctccatgtctgcttcggtgatgtggatattcggagagggatcggatggatcttcaaagattggcctgtagggtataggggcttgcaggaaccttgatttctcatcatgatggctttgaggatggtgtggatcggagccaggagaaacgtaggatgaaccgggtctagatctaccataactgcccattggtgaatggtccaagccactgggtcggaatcgaactagtctctcccgaagacaagctgacggaccccgagagatgtactctctcagggacactttggttgaccacagcttgagcggactttcgtcactgacacccagtgcagtatcctcgaagaagccgttaatttgaaccttgacttgctcttccacgcgtaacggaatatcctcgcgctgggaaatttcaacagccgtggccacagcattagcaagctcatcgaggaatcgatctcgtgtagactcctggccatggaaagttgccgtccccgcatggtccgttgccatgggcacttctttttcatgctcaatatccaacaaacccgaccgaatcgaagtaatgggcacatgaaactccattatgttatgagtctcggtgtcgatcacctgcatagttgaatccacagtttcgagaaaagaccagaccctcatgtcagccgaaagggttttgaactggttcgacagatgccataggtgctcttgacggggacgcaactgcatcctgagcgctgccggggtctcacaatccagatgcaggagtcgacgtatactagccgcgtattcatcggcagagagataggtcgagccttgatggggagttgcaaagaaggcgataccatgacagttgattaaggtcgactggctcgcctctcgtgatgccatggccagagctgctttgacgacgagaccaccggtgctgtggcaaataaaaaaaatgggacgtcgagttgactagggaaatgtttattaaattactcttggatatgaaaagacgatgacatgtgactaacctcatgtgtccactcactatggagttggttcaacagtcgttgacccaaggtatcgattttgtcgtcacgtaggtctccatagttatatagtaggactcgtgctcgaggcacatgctgtagtagctcttcatcaagccaggataatttcgcgccaggcgctatccacgtctctctatgatgggcgccgacgggcgggacagcgacaatactgagggatgagttattatatgatggtatgataagatggaataacttactcgacatcagtatcgtcatggagagaaacaggctcaaaccacgagcgcgtctggtcgttcacgggtggccgcgaaggcatcttgtcgagtccggttgaatatagcctcagtatacaggacgaaaacaaagctgggggaaatcgggatcaagtcagaggcaacctggcgagtcttaaatcccacaaatcagaacacttgagcctcttcgttggggtccggacgatcacgccccgacacgctagtttgcccgctgacagtcgtctccagggctgtgtcagtcaaaatgatatcgctggggctatgttatattattatatatccaaagagagagacttcaattatgtttatacagagaaaacaccccagattccaaattccaaaattccacatgctaatgcaccactctataacggctcatgtatcatcagaaacgcccataacaaaagggaaagtggagagagacagcgcatatgcattataattgtacagggattatgcgtcagagtgtcgcagttcgttgacctctcgggccatgcgctttccaagctcataggttgagatcatgatggcgcaggccggggcaacttttagacatcgcgccgtccaaccgcggaataggccggcggtgccttcttcacggaagatgtgcataaggaattttggtaaggatagttgctctggcactagtgtgccgggtgatgccgtatgaggggcggcgccagtatgaggaacatcgtccatatgtcggaaaacttgctgtcgcgtcttaccaacatcgaacggcgtagtaacaagtgctgctacggatcctgaaatgcccccggaaatgaagctatcaaggaaagcttggagacttgactcttcaggctcgtgatcagaaccggaaagaggggccttctgacgcgccgcgatcagaaccttctttacctcctcgtatccccaccagtagagcccagagaaaggaacatcgcgccacatggtaagagtgaaccctcgccagagagagctatatcccttcttctgcgtcatatggtataaatcctccacagtatttttgaagtggtccgcacccgttcccggagttgcctggagacgtgtccggaacatctccagcggactggtcgctgccgccgctgcgacacgagccaaggaccccgctatcaagggcgcataaccttcagacacccgctgtttgatgggactccgttcatccgtgcgcagccagtcatagccagcaaagtagatgacattggcggggattcccatcattaaggtcgggctcaaccctcgccacagtgtcaaagttccttcattgcgcgcgatcttccgtagtccgtctatagtcgatgtgaatgttcgccgctgcgattcttcgaccgcgcaatccatcgccggatgtggatttgttccgaccgcggtcgcctgcggccctagcatgcacatctgggcatcgtttccgacccagaagacttcgcgacagcaggaggtgataccgagatttggaggaaagtttttcaaggtttgggtggtgtgggaggtaaagcgtgaagcgttatggacctgagattgtgattgtaaacggactcggacgacatccaagggtgtcactggagctgttagtgctggattccaaggaccacgagctcttccgactaacctagaagcccggtcaagacattgccggcggtcgcagacaccatccgctgcccgggagtaatgttatctgttggaacaggggtcttgggcgctggaggagagcctgtcccggatgtagtggccattgtggaatcttcaaactgcgcggcccatgacgtctctagagaagctgttgagtctgtgccgaactgattgccagtaccgtggcctgaagcaagttccacgtgtggcattcaatcaattcgatggggaaacagtccagagttctttgagcttgtgttggaagaaaaatgatgcgtcaccgggaagaggaaccttggaagtttttcggggtctcgcgggtggcggtgggcggagataagcgttgggggagatttcggtgatttggagagatttggggggacctggaggggctagagggacgtgttttttaacgatttctgatcttgtttggcttcaatgagtttgattctgtgacaacttggtttggctgtttcttttagacctccttcatacggcttatcaatctgatctgatctccgaggtcggacatgaggcgaaacaggctatttcggctcgaccaaagggaagatcaatagtggaccttatgtagtggggtttctatagattctgaagagttgaagtatccatatttcctgggttaataggtgtttacgtatgttgggtagaaattgagtcggtgcatcgcctataacatgtatactagtagcatagaagtgaaacctcaggatatatgtggctagcattctatagaatatatcccttgctaacaagtggcattggatccaacaccccctttcgctcccattggcattcgaacgtgtactcataatttgagccattcatgttccagaagctctgcagccgactttcgatgccgggtcaattgtaggcattatgtcgaaggaagtcgatgagaatgggaatttcagtcaggcatcctcgtcgtgtttcgagccggtagattgaagacgcgcgcgcaagacaaccgaagctccagctcgagtagtatattggtgggttttagatctccatggaggaaatctaacccgagtaaaagctgtcgtgctatagttcttaccgcactatcccatcttcatattttgcgcatcgaacacaaggcatacatgctgtccatttggacctctgtgtttgaattgaccctgaagacgtagcataaagtgtcggcctccattttccccagcaatatcggataacctctcgagaatttctcgcttgaagctatcgtgcgagctagccaaccaaacggtagaacactacctatagcctagtttcctcatcactttgtatgcactgaaagtgtcctaagcgaaacgggctggaaacctccggtagaataaagtctggctcttctgttgtctggtgtgaatcaagagacctcgatgtttgagaaacaggttcaaagatcttgcgagccaagaccgagaatttactcgactcaaagccattttgaaagtagtcatcatcttgagatctcatctgcagtatttgtagcatggatattgtggatcgtggatgcctttaagttcccaaacgcaacaatcacatgtcgctatacagcatagtcagctttacttctttctcggtagtccatttggtaaggcagacataggtcctgactccaaattaagaacctagcttggcaatgtagccacacacgttttcattggctctgaaaagtgaagtagggcaaaatggctagggagtatacttgacggaggattgatgcgcaagttcattccaatgctttatattatgcaatatctcgtgttaaatacaataaacagtgacttgaagaggactcctatgtgaggcttgaaaaagccggggatgccaagcctcccgagatcggcgtgtgtcatcatcgcctggagatatcaatggatgcctggatgagaacgccctccaatcactacctcgctatggacgacaacgacgagcttgagtcgttccgccaacagtggcgcgaggaggtcactcgtcgatcaaaacccaaagctgcccctgctgctcctgcaactccggctccgactgccccgcctccgactcgtcttccgcccacacgccatgaggcctctgaccgcaaagagattgaggaggagggtcccccactggcttcatttgaccccgatgagcttgcgcatcaagtcggggaactgagtgtggaaccacccgaagatgatttctcacgccgagatgtcgcagagccaacgtctgcactggaacactttgaacgagcggtcgagaaggaggccgaaggcaacttgggagacagtctttcgcattaccgaaaggcatatagggtgggttttgactgctagaaatggcacttatgacgcaaatactcatttcaattcagctagattccgctgtcgataagtcctaccggaataagcactatgcccatgtatggaagaatccgaatcagcccgcgcctactacccctaccgccgtgactcaacagcccgcagatgtaccaatcctcccgacacctgaacttatcgcgtcatttgcacacctgccaatttcacagctggatcccatcgtcgaaaacacaccgccgcctccctgcccaatcgccactgtgccgtcggaagtgctagtggagattctgcgacatgtggcgatggacgacccatcagcctttggccggatggcactagtctgtaagcggatggcttaccatttcgcccatgagcagcatatctggagacggatctgtcaaggtcgggaatttggcttccagggcatgcattatgactttgcatgcgacctgcatggggaaccaatctatacccttgcgccgcgatacactccatttcccaagggcgggcctgtggaaatcccccagccgctgtcttcgtggagccaagtgttccagacccttcctcggattcgcttcacaggcatctacattagcacggtcaactatactcggcctggtgctgcatctgcgtacacgaatctgtcgtggaacagccccatccacatcgtgacttattaccgctatctgcggttctatccagatggctcggtcatctcgctgcttacttcaacggagccagtcgatgtggtccctcatattagcaaagagaatgtgatggcagcacgcaccccagcacaccgaaagaatcaacggcgtccctccgatgcgggtcatactctttctggagctactgatgcattaccacccgtcgccctgaatacgttgaagcatggccttcggggccggtggcatttggcgtcgcccgttgacacatcagaaacttccgacacgcccacccaagcctggaagcccgactcaacttctgatcagaaatcgctcctttccgacgagcgggatctcattattgaaacagagggtgtagaccccaagtatgtttatacgatgcatctatcgttacgttcctcgaccgtaccgaaatctgctcaagtcgggccagcttctcccaacccatcgaagaacaccaagctagcttggaagggcttctggagttataacagactgacagacgactggggcgaattcggtcttcgcaatgaccgagcgttcgtgttccggcgcgtacgcggctggggcttggactgatatgattgatgacttatacacgaaagatttgttacatacatggaaaatgagatatacatgaatttgaatatattgaatatcgtttcggggtttgtatcatccctgaagctattgagagtcacaagattaaaaatgaaatacagaacgtttcaccaagaaaaatgtgataagatattttccctaattgaaaccgcaagggatctcgagaatcgccagaaatatatcaacgcaggttgctcagaaactggcggaatcgtcggggaatcgatggacgtggcccaggagaagatgttcgttccgcgactacatggtaagcctgcaaggcattggtcttgaatgcatgcgtaccaccccacaagaacaggcgaaagatacgataattatgttctccccaagccgcgataagatcgtctttggacgaatctagacgctttgcccattccaacattgtgagctcgtagtcccgagtctcattagtaacatccagcaccgcaaacccgtggtataagagctcagcaaggacgtcctgaagagtcatgaaagtgtgcgtgccacgccaaatatagtctctggtaaaagagctaacagcaaacttctcaacagctgccgaaccgtcaaggtacatacggccaccgggcttcaacacatcccacatcctgcgtgcaaatcgttgataattagggatatgctcaatcacccctaatatcacaacatggtcgtatggctcctctgggttatgatcaagaaagtcttgtacgaagacttgaccagggacattcttctcctctataacacgctgcacataacgagcgctattgggcgcgatcgtcaacgtcgtgacatggactcctcgagcaccacaatactgagtcacaccaccccacccaccaccaatatcaagaattctcatacctggtttgaggccgagagaagcaaacatggtctccattttgtgctcagaggcttcttcgagcgtctcgtccggtcgctggaacaaaccgtgggtatagaaccggaaacgcttgtcaaggaaggagaggaagaacccgtcatcgagaccgtagtgatcaccgatcgccttggcgttcatcttggtcgcggtccggagaaaatcatacacgaactggaatttctgtcgcagaggcactttctcctgtagattttggcgggcgttgaacaaggcgcccaagtcaccctcaacctcgatatcaccagatagataagctcggccaacgcccatttctgtcattggtgtgcgcagcgcactctccgagcggaaaatcactcgataaactggctcgccgatgccgactggtatcactgcgccgttgggcagctgtatttcgccgggcgtctttagtcctgctaggagtgtggccacacccgtgcggggtagactattgcgagatgcttttgacattggagattgaagatagtgttaagttttggtaattcttctgatggtgatgtatagccacggggagatgaagtcaaatacgtccaggactagatttgtaatgccaacgacgaccataggagtatttgaaatagaagatcaggcagactggatatgtccatttagttgcaagagcacgcaagacaacctgcattagcggcagacagaatcagcctattggttcaatctcaatatctgacgtgtgatagtatctgtgtcaacgtgcagcttatactccgtgagaatgccgaagaggggtattatggatctattcacaataaaaaggaaatatacacatgggagattaaactaggattctatatctcctcatcttcatcatccatcatccacaactacaaccatccacacacccacttgaccattactcgcaaggagaggcgtgcaatggacccatcgattgcgaccgtcgggattggaacgcgttgtccacttgatacgcgcagtcacactgcgcccaactttcatagtttgtagtaggtcatctttaactgccgaggaactgccaatgcgggatagaaatggtgattgcagcatgcctgggatctggagggcaggcgacgtgaacagaatccggagggaagggtatggtcgaacgaggagatactgtatcatgtattatgttagtctgtgccatgaagtttgcaaataaacatctcatctcttacgttctcatacacgcccgcaaatgacatccggaaaaggggcgatttcatctcacgtagacggacggcttcagtctctctttctaaggatgcgtcgggctggaaccatgatcgcgggtgatgcggatatgcgaggctttgcataggttggaacagatttccaccatactgttgaacagcggagagttcccgcggactgaacagttcagtcagctcacggaactcatccttctcttctgcttctggtggctccgcaatgctctcttcgtcgggatcgcggtatttgttttgtagttccatcaaggattccatcgaggctccctccattgcaagtcccgagacatcgatctgtgcgccgatgaagtatttgacacggccgtggctgtcgcatagaggtgcgcactggagcaggttcatgaatggagagccgtcacgacgactggttatgttagttatctgggtgactatattggctaaaggctgagttatagagcatactagttgagaaacatttctgaatgatgccggcctgcgttaatagcttcgcgaagtcgacgaacactgttcgcatttgtcttcgggccttgtaaaaagcgacaatttcgaccaagcacgtaatccatgccgtactgagttgttctgtggaactctgattttgttagttcgattcggaaaacgagctggggaaagaaaaacataccttctgatgcgaaaataattggattgtcaggtcgcgatgggtctgtcaggcaaaatacttctgccagtgcattcgaagtcccgcgaaacttcattggcaaggttcctcggactcgctcctccacgatcttgcttgtgatgttgatacatctggctgtgatgaatgcagggagctcctcggcagtgagagccaacagcccgtctacaacacgccgctccaaaacacggttcaccgtcaccccggcggcttccccgtccgtccggactgctgggggaggcacatcaatagagaggcggacgagcgcattagcatattcaattgccttaagcgctttggaggcgttgaggtagtatgtgagggtagaaatggagcgcggccgctcttcgagaataaagtcacgaaatcgagctagataccgggggttatttaggattgtgagcatatgttcggacgaaaacatgatgtcggcaattctttccagcttgtagagtggtagatcgccgccatcgtagggcgcaatgagatcgtatgagccggtctcttcgctgacggggttaaactctggtgctccctcattcggattgatttgctgtagaagaggaagctcattggccgtcgcatgtcgacgcagattcttgatagaaggatttggtgtgggatacgcttccatctcttcctcgtgaattgcatttagactttccaacctcggtggatgggggaagttgtccaataattgatcagtcctgtcttgtcagcgcattcagtgaaacctaccaccttgagttcaacgtactgtgacaatcgaccggactcgctgacccattcgtggtattcgtcttgaatagtctcagtgaatgagcgcaatgactctgcatcgggggttcttagcccatcatggagcccctggaggccacggagatctgtatgcgacattgtttgagtaaagaaaatacgagatccggctgtataacgtcctggaaacagaccttttctttaatagtaggaaatccttccctaggcactggcgcccctccagaatgatacatcatttcatgcactctccagggtttcattacaaggaatgcaacggacacgatggaaagagtctgccaaagtacagagataatatgggaggtcataatggcaaaaagtagatcgatcgatggtctactgaactccacgagatcggagtcgatcgttgatcgatgatgccacagtgcagcggatgacctttggggatcagctattgaactttgggttgaaaacactgactggaattgcctggaattgcgatacatccattggattgttcgcaaataggctacggttggctagttcctattcgttgcttggataattgtttgacagaggatcttccaattcccccttttccctcgaaggctgcggcaggttttggatggtttgtttaccgccttggtctcgtctgtatactcagctcccttttcttcttgcagtcaaaataccagtccctcagagacatcaccagtgggaaagacactacaacggtgatgtctcggcgtggaagctttgatttcacggttcctttagattgacgcggcgaacagagaattagaatagtctgccttattatattcttttcgtatgctttatataggttcatgacaagacgtatgccgtatgttcgagtttcgatatatgaagagaagagaccgagaataacaaatcactgcaacaccataacccacaaatataaacaaaaagtgaatgaaaccagaaattactcgttctgtaaatgacgatgaagtagtatgcagcccatatatagcaagcgacgccccaaatgacattgccatctacccactccgatggatgcatcatgtgctctgcaagtatgaaagtgttcacacctcaccccaggtgccgagcccagctccaacaccaatgacactattgctttcgctgccaccaatatcccaatagttccgactagaacttgtcatcgtccgccggctggaaatagccgagagcttggcgctctggctggcacaactggagccaggccgccgatgcggtcgtacgattggcgaggagacacccgctgtgtttgatacaccggagaattgtgatgcgcgacgggtctggggttgtgatcgggagtaggctcgcgccacgagtgggtgatgttgccggatgatggcggctcggcgggatgcgtcttgcgcgcggcgcggtggggttggtgtgtgcgcttcattgggcatgtaacctcggcggctgaagcggttgcggaggtagcggaataccatcattacatcgagtccgctttcccaatactcggactcgtgttgaagctttatcgattcggagagttggtcagatcgctttggatcgtcatcttcgattccccattgtgcttcgtgctcccgattcgagtctcgaagtgtgggcgtgaagtgcggtgatagcatggaatcgccagttgtatcagcaacggttgatgcggtcgactcggcaggtttctgagaaattccgctttctgctaggcggttgagagacatccccgcatattcggcggatatgtctttagtcatttgataataggttgtaaatgccccgggatgttcacaaatttgatgaacaaggattcccagctcatgggcgatcgtttgaagcacctttgtctgccagagtggcgaatagctgaattctggctctggttcacgagctagtaccgtttccatgtctagtggatcttcctgtgggagcggttgcgcgtccagcggcaacgactcaccaaagatcacggagagcaaggaatcatcaatcccgatgaggtcacggatcaccgtgcgtgtgatgcggcgccagaaagactcttcatcctccgagacatctttcgacagtgatatatcccgtgatagcacctcggatacacgactttgtgggctaggatcaaccgaatgacgcaggctcgatcggctggtcagactagtccgcctctgtcgggtttctcgttcgatttcctgcaatagagcccggctctggtccatgcgccattcttcgattcgctgccaccgttctcgctcgacatttgtctcgccctcatcaacagtatccagatatctctgcacactcgagtgactgtgatgttgaatatggccgtacgagggccgttgggggttgtattgctcatgctgccacagctgatcctggactgcctgactcgaggcctggaaactgcctaacccgtcatgggccgggagcatggcaggcggcccctgatcgaaccgtgttggggaaaccggggctaggtctggtattcgaaaagcgtgcagtccatcgtctaggctgtctagttcggttccatcttcgtccagttgatcgtcgagggcattctcgtcatcggcttctccctcggcgccgattccagagcgggttgcagcaaaggagccgaagtcactcagccgagaagcacctacagtacgcgtacgatcggttgaagtggtgtgtgtccgagcggtcggggagaataggacccattgtgcggtgtcgtcatcgcgctgttccgacaaggaggaggggatgtcgagagtaggtggcggaggggttgaataggaagttctgcggcgggggacgtgtgttgggacctggaaggccatcttgttgatttgatcgcagccaaagtagatagatagtacgataagcgggttcgatggtggatccagagagagggggagttaaggctgttcaagcggggattataagcattaaagtatatggaggagattggtataaataagaggaactaagaaaggaggagtagaaagaatccaagtccaaaaacaagaaaggacaagcttggaagagtgtcctggtgatgtgagggagggagattagctgataagcgggaagatgggcccgcgggagcccgagtcgccctgggatcggccagtgatctaccaatgatgcaaccggtatcggaatggtgagaccagttgtgtatccgttctgtatcgcgcgtagaagaggtcataagataatgtagagacatgttgagtatattacaatattgggtacggagaagtgaccctagtactatggcttgaagtatggcaggtgcctcaaggagtataagcaggcagaataagatcactggtcaactccctttagaatcactttctttagaatcactttctttagaatcactttctttagaatcaacttcctttacggagtagattaggaagtatgttataaagtaaagtgttgttgtcgccacttcagatgccggataatcacatgatctgttgttatccattgggtcacatgtctttcagaggtatagaactaaactattgcgaacatcggcgtttttgaccttcataacatcggtccccgattccttggccacttggcagaagatggtcgtgtgattggattcttgatagaacgtatcaagaacgcccggcatcaaacaccgcgatacaaactgatgcagctttctcattcgtgattcaacggctattttacaaattccctagcggatccatcacgtccaggtgggggagatcttcttcaaataatttgttgcctatctttagggtgttgatatgtagttagttagttaactagttaactaactagttacggagtagttacccccttagataatcgtacccccgaaaatttaggcgcaccttcctaatcgggtatagatattgtcgctctccttcttaagttaaacttcccagtagtaagacagaaggtacctacaatttgtatgtaaactcctagcaaaaataagtcactcctaccatatcctcaggtatcaactacttcactgcttcatccttgcccttgctgatgggagcttcattctcttgttcgcaatgtctaccacgatttccatcaggcacttgcgaccgcacctgagtagggggtttgcagatttataccgaaaggacagatggagagaagtgaaagatgcgaatttgaatggtatcatcgctcacggggtatatattagactactataatatagcatctcgagccgacgatcaatccttcccagctaaggcctctccgacccaatccatctgcacagcactgacaccacgcgcgtaactacggttggtgaatacgaattcgttgtacatgattgcctcgagctttttgccgtaaagcacactagacgggtgaatggcgacggtttggtttccaacgatcgtacgataactgccatcgggcacgagacgagccgtattggtcgcgaatccagctaggaagctctggagaatgaggatgggcgaggggtcgtgtagtgaggtattgttcagggcttcgttggtgagcagcttggcttgtcggcactgggtgcggagttgcttgcggacgtcctgttgtggcctcgttagtttcatatgactgctgtccaatcatgtactactcaccatgactgattgcatcgcccggtgggataccaggtgtcgctctgcccatgctttacggtcggcgtgttcagcggcatacacacgaacggtcgtcagcattgtgaggtggtcaccctcgcgccggtatagatcacgacgggctgcttctgctgcctccttcttttcttccgaggtggtgttcaaaaagatgttctccacactgagacatgaaataatatcaataacatctagcaaacattcaggcccattttcgccagctgccaacagtacacgtcctagagttggagtcaatggtagcttggcaatatgtaggccgacggcgctgatctttccatcgtcttcaagcgcattaatgttcaatagctgcagaagagctttctcgagtgcttcgcgtggtggccgcgtcaggaatgggaacccaacaatgtcatcaacgccacgagccttcatgttcagtagggcttggctcagatcacagcgcagaatctcgggcgtgtttgtctcatccaaggccagatagtctttctctgtgtacaagcggaaacattgaccaggagcctcacgaccagctcgacccttccgctggattgcagctgatttagagataggctttactaggagcgagtcaagaccaagacgagttcggaactgcttgactttggccttgccgcagtcaatcacgtgccgtacaccagacacagtgacagaagtctcagcaatattggtagatagcacaactttgcgcgttcgtggtggagcaggggcaaagacccgttgttgagcagcctgtggcagcgcggcgaacagaggtagaaccaggatcttaggaagtgatgggtccatacccatggcgtactcattcactaggtgttccaatgcctcgacggtttcctggccagtcaggaagacaaggatatcacccggcattggttccttctgatgaatctgaaagatgattttcagcgctgcatccacgaagtcatgtactggcgcgggggagtagatagttttgaccgcaaattgtcgacccttaatacggcagacagagatatcctttggactcgaagtatccattttgtcggcttcagcctcgactccctcaatagccttctgttctggctccggtcttttgaatccttgttggaagaagtctgtcaaactctccatatcagccgtagcactcatgacaaccaccttcagcggcacaccacctcggccctccttctttccagatacaagattacgcaggaatccaagtgtcagatccacgttgatgcctcgttcgtggacctcatcaaccacaatagcgctgtacttagtcaagttgggatcgtgcaacatctcctggagcagcattccctcagtcaagaacttgatccgtgtactaggcgatgtcgacgtatcaaatcgcacagagtagccgactttgctggcaggcgagtgcgatccaagcggtgtacccatctcctcggctacacggcgggccagcgaaatggcagcgactcgtctcggctgcgtgatagcgatgcatcctccgaccattttcttttccgtcttcccatcccgcgtgatttgcgtaggtacgggccgacaccagaattcgtctaccaagaactgcgggatctgcgtactctttccgctacccgtctcaccgaccaacagcatcacatcttgttcccgtagcagatcgcgaatcaaatcagcattttcgaatacggggagctttcgccgtgtctcgaggagggctttggccttttctcttaaaggagtgaagttggttttggtatcggtgaaaggtttggacttcgacttcgggtggaattttgttgttgatgggccgtttgtttgagatgctgcatgcggccatttttttggaacagagactgatctttctacctccttggcagatgcagggatttccctcggttcatcttgatcggcggggttggaggcttcgggctcatcgagcttgcgcttcttgtttctcttcttctttcgctcgggtccttctgtgggttgagatgaaagggtttgctttaaaatcctctcatcatccgactccgcgaacacggtgcgaaccttttctggcattttgagttgagacgcgaaagaatgttcaccaggaagctcgaatctgaaatttttgccttatcgataagataagctgataaacattctccttatcaacatcatcagccctagttaactagcggcccttgttattcatactccgatcattttactttcgtggcatcgtgacacggcacgaatgagctgttttaaatatatactataagcaaagaaagtaaattatgtggtcattcccttgttcgagtcttttgactacaatatatgtaaagtagaattaggttggcgaaattaaattgacgcttgatcagtaagacaaaataccgaaaaatctggcgtaaatatcctcctttagtacctttatttgctacctttcgctctttgcttacaaccttggaataattaacactatatgactttgattttggtatccttgaacagagtgctagttcatgatcgtgatttatgtaaagctctgtgatggaaaatcgtgcagcgtattttaccacacgactataacaaaaaccaaggtccctgtttaaggcctagaggggccatatcccattctgacactctggcctatctaaaatttggctctgctggaggaagagaaaatccccgtggtctattctattcacgccgagtcgcttctatggtcttctccgcatcaacccgcccttggactcaagatctttttttggttgtccctgcttgatactcttccactctagagtagtcgcacccagtagtgtcagacacgagagaatcaaaccgacctgaaacaccttcttgagcgcttcgttgtaggagtagagaaccacgtcgtgcagatgtgccggcattgaattcagcagctccgtgacaccacccgaggtgacaagacgggggttgaaccccggcagcccggaaagtttcttcaccagctgattggccagaatattttccccgacggagacaaagatagctgccccgatcaattgaccgaacagcatcagtgctaagccagagggcacgtcgggctttggaagaacagtttgtgcggcgagatttgggacttggaaacacaagcccagaccgattccgtagacgatctgataaccgatccattttccttccccggtatctacctggaaagtggtgaggagaccggctccgacggacatgatgcaggatccgataatggccaatggagtgtagtatccaatcttggagtttatgattccaccactgattgagccaacaaccattgatatcatcgtcggtagcagacggatgccggattccacagcagaactgcccttgatggattggaaccagattggaaggaagtacactgtgattgaagtcagtaacatgaaataatgtttgatagtgcggtttcattaccaaagatatagattcctgatccgacgcagagtgtctgccagaagcctgaaatgatgctgcgctgcgaaaagatgcgaactggaagcgtagctgtcttcggaagaaagacctggacgacaacaaaagaaataagtaagacgctcatgacaaccaggcaagccaccacgcggctactgccccactgcaaaatgtcagctatagttggaaataatggtgtacgggacttacagcatacgtttggcctccccattgaagtgccaatatgagacagaccacgccagatactagaaatgtagtgccgaaaaaatccagttgcagctttttttccgtccaggagacctttgttgtatcctgcttggggacctggaggcagaaggcaatgaagacgatggcagcaccaccaattggcagattaatataaaagcaccatctccatgtcaccttcgacgtaaagacgccgccaatcaagggacccacgacagaggcgatgccgaaaagggcgccgaacagtccttgaatttgcggacgcttctcaagaggaacggcatggatgatgcacattatctaagtgaatcttttgtcagcaattggcacaaagggtaggggctagaatcaacttacagttccagccagtattccagcagcaccgactccacagattgctcttccaattatgaaggcaactgaattcggcgccgctccacaaatagcagaggcaaactcaaacactagaatactgacaaggaagacaattctgacagaaaagagcttgtacagcttgccgaacaggagttgaaatgcgcagcatgtcaacaagtacgagcttccgtaccagccaacgtggtcgaaggaattgaattcatcggtgattttgggtatggcctatcaattgcgtatctctcagcgctagaattagactgaattcaatgtatcatgatcataccgttgagataattgttctgtcaagcgcaactaggaacatggcgacaaaggccgagacgatgagacagacaaccctaagggtggactggttctcaggtgggcccgaaggacctggagagcctccagttttgcctggtgcgacatctttgactggtgcatcataatgttcatgcaacaactctggagcacccattgtagccgttttggtgctttcagatgtagaagtgcgtagtggagacataccactaagcaagatgcgaccgatcggttattgatgcgcgagagataatcttgtagaccataataaataccaaggaaagctcccatatttaaaggggcccaagggacaaaacatggtcggcgatttcgcattttgcagaggatcaacaagatggtcgggggttagtaagtgcgacggttagcaagtggcgttgcttcggcacttataaaacccgacttccccttcccggtgtttctctcagtcaacccaggcttcggggtctaggctctattatttgacatctctgacgcaacaggataatctcaggtcatggcgacgccaatctccccatccgagcacacagccgccgtcaaggcccggcgcgtgctggcctgcgtgctgtgtcagcaacgcaagatcaagtgtgatcgtacattcccttgcgccaactgtgtacgtgccagcgagcagtgtgaacagtcaacccgccagcgacgccggaggtttcctgagagagagttgctagcgcgcctgcgacgctatgagagcctgcttcgccagcataacatcgagtttgatcctctccatacgcctactgcaaaccgtaggtctcccagcgaggatggccaagatggacttccagagggtgcccactcagaaggtgctcttcgtgatacggattctcgcccgtcgagagaaaagaaagcagtcaagcctaaatccttgtatgaaactcggtgttattcttctcgtgaaacatacttctggatgactaatcagtagtaggaatctctggcatgctatgaatcaaaaggtatgatcgatcgcctctgtgagtaattgtgggctcactgacaattacgaaagactattgatcccaaggatgatgatggaaacgacggtgacgacgacgatgaaaacgacaccgggttcctccacgacaatgttgatatacgccacgccgtaatcaagaccgcatggaaccatatgttccaaggcaaaagcaacgaccacttgttcttcggttcaccggcagggaacatcgatgacctttctgcttcgcatccgacccaggtacagatcttcaggctttggcagatctacttggataacgtgaaccctcttcttaaagtaacgcacacacctacccttcaaacacgtatcatcgatgctgctagcgacatcgccaatgtcgatcccatattggaagcattgatgttcagtatctactgtgtctccattctgagtctcacagaagatcagtgtattaccttgttcggatctcccaaaaaggatcttttgaaagcctatcagtctgcatgccagcaagcgttacggagttgttgtattttacgttccagtaaccgtgagtgcttgaccgcattgtatctgtatctagtaggtgtgtccaaactttttgtctacactcactgatttttgcaggtgtcgaccaggcctgacacggaccctgtatctctctcatcaatgcttagcgttgctataaggatcgcccagcggataggcattcataatgagtcgttatacagtaaatgttccagtctcgaggcagagatgagtcggagactgtggtggtcgctcattatctttgataatcgcatctgcgaaatgtccgattataaaaccacgtcgctagctcctacctgggactgccgtattcctctcaatgttagtgattttgagcttcagccagatattagagccccacccgcaacaagcaacagaccaacagagatgctctttgctgttgtgcgcagcgagctcgccgactttgtccgtcacagcaccttccacctcgagtttaccaatccgtttttgaacacgaccgcccgccgatctaccaccacagacgagggggagggacttctagcgctcgagaagatgatagaggagaaatacctcacattctgcaatccagagaacccactgcatttcatgacgatgtggacaatgcggggctatttggccaagaaccgcctcttgcaacactactctcgatacttggcgggctctgtgcagcagacagctacacagcggaactcaggcatctctcacgcactgcgcatgctagagtgcgataccaacctcatggcatcgtctctcaccaagggatacctgtggcttattcacttccacttccccttccccgcgtacattcatatccttcaggatctgaagaagaggcccatcgagaaacacgcagaccaggcgtgggaggtcatgagcaataactacgaggtccgcatgatggatgctaaggaggaggaccgccccttctttatcgtcttctgtcggattgtctttcaggcttgggaggcacgtgaaaaaatagcgagacagcaggagacgcccctagtgccaccgcggattgtgtcggatatccggaataaagtaatgcatatgatatcgaatttcggacaagacgcggacacaatgcagcccggtggttccctaggttccaatatgggtgacctgtcgatgcctactgagatggatttcagtgttcctggcataacatatggtgctgactggcaggttcccacgagtttgggaccgtgggggtatcctgagattcctgggccgaacttaacggacgtggatgtgaatcaatttcttttggacacgatggagtggaatgggctgcatgtacgaacggggtgagaaaaaaagaaattctcattcgagatgagaattatgcgatttttgtacctgttgagttaagaacatagtcaattgaatctaggggacctcagcttgaacgtgcctcggatagtataatgtccgagctgatagctcgggagttagcatgtccgttaagtggagctgcattcctcgctgtgattggcttgacttgagcttggatgcccagaaagccaaggttggcggcgccacggatccacccgtaccacatcgtggcaaagtcaattgtatacatgcggactccgaacccggctgcctgcaattctctataaaagacactccctatgtcttcatatccccatcagctatcagagtcatagttttacttggtacactaaaatcggtctttcaaattacaacttcaagcatgtctatccgagccctcaaccagaactccccctccttgaactttgccgccaacgcggagggacagggtccatgttgccctttcttccgtcctcacggaggcgagtatccttactccaacaaatggtatcttcagtctggcagcgatcaacccggccacccaggccatccttacttgtctccgtgggccgaaaccggcgacaaagaccaggacaatgaagccaacgacaacagctgggataccaccaaccctcgcaagccataccaatgcccagggcccgcggaagtttatcctccgcacaactttcctagcgcctctgaaggccgcaagccttgccctttcccgggctaccctcaacagccgtacacctacccagttctcttccatggtatcagtcacatgcccatcccggccctgcggagtgtcaaaagccatatccttccctctggaatgacgagaaatcccagccctatgctcgcaagccgttggggttcttgttattgaggtgccaaagacagagccggatgatgatgccgaggctaagagggttgaggttgagtaattagaggtttggtatagataaaatagtcagtattaaaaacttaggcctcatacacggatcttcctcccatgtgtagattatcaagaaaatggaaatttcgagctcaactaatccccagttgacatatatttgaatttttcacctaaggaccaacttatttgattatgaaattgttcttaataaaagctagttattagaatggtctggacagtgaagacgggaataggtcccgggaggcccgaaccttattcttctaaccaatgagaattgatattacataatgattcccatcacagacatcgagcaaaccgaaggataaaaaaatcagtcacgacgaaaatggtattacggccacatctgacgagttagaggagggaccgacaaaacggaagttaatcacaggcctgccttcaaattaaaattctacctggcttaattcgtgacgattgcggagcaaagcgaagcaattaaatcaacctcgttgttttctcctatgaatcaatgcggtgaaatatcatcggccaactttggcagaataatccaaccggcagaatgaatatagattagatggatatcgcagggtccgcctcgatagcacttgggaggcatccaaagcagccgtcaaagcattgaaacatggaatccaagccctggctgataattattatttcaagcgtattacggactggcctgcttcttggatgcatccgagtcaagcgaaatgaagattctgatatggaaaaatccagaaacatgcagataactgcccgtcaggtactctgagagctcaaagagcgaaaataactgataaattgaaagcatatatccgttttaagaccatatctagtcttataatttcaattagtatgagattacatggcgataaactcatagttgagagctacctaattaggcttagtgcccctcgatttgcttcctagacttaccgcccaaggactagtactatttatcgtaattctgccgatttcaaacacgcataatctaaaatgccaagaagccacgtgctctcgggcaatccctccgctttggcggggtttgtataccttcatttttgctatggtgtaatggtaagatagtctgtaatttccctaccaacttatctttatttctatgtatttgtcgatagggtctctcattggaaaatgtgagagccatgccaaagagtaaagcgtccgcgacacgtgatatatcaagtgcggggaagataagaataaggtttataccattttaggcctagtgaaggggctagtggcttgataagacgtcagcagctgcattgagatgtggcattggcatattggaagaggaaagtcaccgcgaaagcctgagaaattttttgcactcgaaatggtgtcccacatattgcagctccaccaggaactgtggtctcacgagtcacaatgtaatcctataaagatcatcgagagtcgctgaactgaagacctggatagacaacaacaagacagagattccttatcttgattcccccgctgacaatcttacactatgggatctatcgagatcatagaacagcagtacgatgtccttatcatcggtgccggtctttcgggtatctgcgcactacacaacttccgaaagcgctttccatcgtggcgcgttggagttctggaggcagccgacaatgttgggggaacttggtattgcaaccgctaccctggagcacgagttgacaccgaatcactttcctacgcatattcgtgggacaaagacctcttgaacgaatggacctggggggagtctttctccacccagtcagaggtgctccgttatattgaacatgtctgcgacaagcacaacctttacaaaaatatccagcttaacactcgagttaaggaagccgtttggcaggaaaagaacaatacttggctgtttcgcgacgaagtcggcacccatcaccgaacccgtttcttcgtcagctgcatgggtttcctctcaaccccgacacttcccgccattccagatattgaaatgtttcaaggaaaggcattccatacctcccggtggcccaaagactttgacatgaagcgtgatctggccaacaagcgggtgggtgtcatcggcaccggcgcaacgggaatccaaataatcacagcgatctcaaaagaaccgagcatcagatcattgaatgttttccaacgcacggcaaactggtctgcgcccctacggaacgaggtgattaggcccgagcagatggagcagcaccgcaaaaactacggtgccgttttccaactctgcgccaaaacacccagctgcttcatgcaccaagccgacccgcggaagtccctggaagtatctgcagaagagcggttggagctttgggaagatatatatgcaaagcccggttttgccaaatggctaggcacattcagcgacacatataacaaccgtgaagcaaacaaactgtactccgattttatggccagcaaaattcgagccagaatacatgatcccgaggttgctgacagcatgattcccaaagatcatggcttcggcacacgacgtgtccctctcgagagtggatattttgaggcatttaaccagcctaatgtccaccttgttgatctcaagaaaacgccaattgagagagtcacgaagaatggtattgtcacatctgatggcaaagagcataaattggatgttttgatctatgcaacgggctttgacgccattaccggtgcattcagccccattgattggacagggagaaacggtcgccctcttctcggctttagcaacaccaagcaaggcgagcaagcaatttgggttgatcaccggccccgtacatacttgggcatgacggcttgcgatatgcctaacatgttcatggtcctgggtcctcaccaaccattcggcaatgctccccggactatcgagcacgccgtggaggttatttcagatctcttacaacactgcaaagacaacagctactcctatgtagagccgacgggagaagctgtgaatgcatggacggaacacgttgttgaatgcagtaaaggtgctttgtcaaacgaaatcgacagctggatgaccggggttaatacgaatgtgaaggggaagactgttagaagtgttgcgaggtacagtgggagtgccgtggagtatcgccgaagatgcgctgagtctaaggcagctggttggaaaggtttggcatttgctcaactgtcaagttccaagctttgatatagataaatacttatcaactatcaccattgaacgtattgtttacactgccccataagcataccacaatcagaacgaatcaacctcagtcagaccccaaactagacaataaactggcagaaggagcaaagaatgtcgtcccagtaagcggcttcgagaaatcaaggatacgatcatgcaggccaggaggatcgccaataaacatacgctccatcattctttcaatcacccaaagacgacgagtatagcctatgaagtaagtcccaaactcgccagaaccaggagatccaaatggcatattatcacgaagaatatcatgctcattcccatcttcatcttcaaccgtggtgagtgtcttgtgagagcgctgacccgacttggcatcatcgagctcaatattatctattttggtgcggccgataatcctttcctgctgttccgtcgagagatctttccatccaggtagatcgtgactgtacttctgtacgacgatatagctgccacccgcggcagctgtatcttcctctgcaaccagaacggaagccggaaccgccagtccaactggattagccgtaccgtccacaaatccaagaagatcccggacatcaaagtaacgaaaaccgacagtctcatcgatgacggagaccgagtcgccgagttggtccagtagctgccgctcgaattcaaagcagatatctctgcgctccgagcgaatgtggaaaagcaaatcaccgctggtcgagaccgcggtgtgtttttcgcctttgacctcacggaaagggtgcagctctgagggtcggggaaaccccgtgagacgatcccagatgtcacttccaatgccaacggtgcatgcaaattgggcgctgaggtcgcggatggatacatttttggccaggctgtccacgcctgccagtgtagagcgcacgttttcaatggcattggacttgttggtcacagagagaacaaggaaggtagcgaatttcgtgagcggggcgtctacacgctgaggagccattgggacacggtgggtgttcatatttgctttttgatatgacttggaattgtaacaggcagatatgtgttgtctgcggaatgaacgcccggtgaggctcgcctggttggtgaaatgccgttctttccagaatgaactcctggaagcagctcgaaaggtatttgaatgaccaaaccgagaaattgataattgaagacgaatgttgggaatattagagatgaccagtctcccggacttggtcatacttcagctgctgacagtctgtggtacggagtagacgaagctcctcatctggtgtgagtgcatcaactgattatattcaggaagaaatgattggacaaatcatgttctaaaaatattggagagcgaagcaagaaaccggtcgatgtgacattgtcggtggtgacatcaccagccggaccgcggggaaatattacgtgtgtctctattcgttcatgattttgtagtaacttgattcttgcagatgttattcctataaacaaatgcgaactcatcgctgcgtgtacccaccatccacgaataaagccgtcccagtaacaaaagaagcccgtccaccactcaagtaaacaacaccgtcggcgatctcctccggccgacccatacgctccattggaaccgcattagcaactttctcctgcatagccgcgaagatctggggcgacttggtcgtcaacggggtctcggtatacccaggacagatagcgttgatgcgcaacccatcctttgcataatcctccgaggcagtcctcgtcaaaccaataaccgcatgcttcgtcgcagtgtacgcagtcgacaacgcaatcccagcgacgccctgaatagacgagaagttgacaattgagccccgctgcagtggcctgccatcaatcgaagaccggataggctcctgcttcaacatgatcttggcagcagctcgcaaaacgaagaatgtacccgtgaggttgacgttcaagatacgctcccaatccgatgtctcgcagaatgcagctccgcctgcgtgcttcattgcgattccggctgcattgacgacgtagtcgagtcggccgaatgtcgtcgcgacttcttggacgacatggttgacgcggttctcatctgttacattggtggggtaggtgatgacccggcatggctttaatcctagtccgcgctgttgttcttcgatctcggctttcacagcctccagggcttcagggccgatgtcgagtagggcgattcccgaggctccatctctggcgaatgtctttgcacaggcgcggccaatgcccgaggctgcacctgtgataagggcaattccagatacatccatttagggtggtttgcggggcttaggatacttgattgatctgctggtgtgcgtagccggaagggtgacggtgggtaaatggaacagagcaactgaatattgatggtttatatagtttcccacggagagacttgaatagacagcgatgacagcccagtatctttctccaaaaagactactttgatgcatgtggggttgtcgcggagacttgcctaactcgcgtctgatgatagccgtgcaacctatgacaacgcatctcggacttgctttcctatactgtagggattatttagtgtaaagacacgtactgctgctgatacatacgttcagtgcggtggtgttgcagctggttgtcaccttggattgagagcggatttcatacaccaagtgctaacattcaatttaaaatttggtactagaattgatcaacgatcggtaattgttgaatcattttggccttatttaatcatgttctattgctctacgtatggggatatagatatccaagtttacagtaatagtcactgaccattgatgaacaagtttataggtttattgcccacggtatcatattataaatcaaaatatctgatgtatcggcatggagcctttcattaaatccaaccaagtgacactcttcccgttagcacaagtcttctcctgccaaattcgttgaatattggccaatgtttcagtgaagcaagacaagccactacggcgtgccgaattcacaaaccagttggagaatgatgcctgaaccaatggatcgtcggcctcacaggccgcaataaacgcaggccagataaatcctgccgagccatgtactacagtagagtccgtgttctcgcagcgtagtagatggtccaacacgaccacgaccttttgctgtagcaaggaagcatccacgtcgtagattcgacggtagaaatatattgccagtgcattttgcatggcattgagcatattgtctatgacttcgtggtcgaattcagattggatattctccaggctgggtagtggcagcttgttgatgtagtcttcgagagtcttcgcccggctgatgaactcttttaagctgatgcagttcgatgcatcctctctttctgccgcgtccttttccttccctaatcgaataacttgggatagaagaagaacccatggttcagggataccaaatatctccgggtatagggtgttagaccagaagccaggtctttcaagatgcagatcattctcgccttcctcttgcccacgcactctcatcatttcttggtccagattcttccaacccgataagcgaaatgacagactgtcgaggctgtagtttccaagcccgctggtttcaatggctgcgtgcacgtgatgacgctgtcttgagttcgctccacaaatgaagacactctcatggatgatacgttcaaatacatagcagtgatgtagtaatcgtacttttcgagactttttgcgcggaagtcctcttaaacgaatgaacttttcagcttcaacgaaataatactccgattcccttcggctccctgagaacatcgtcacttggaccatggtgagcaatgccatcaagattgacttgtatttggctactttcggaaaattgtaggcggtcataagcatcattttcgcatgttgctgggctttttgcttgtaaattatggccttctcgctccatgtttgggatcgagagactcccccaaggctgaatgcacttatggctaatgtcccgtagaaggcacatagactggcatcactcatgttatcaccaagaaccaagcccgcgaggcagctcttggtgtgaggtataaaaagaatgtgccagggggttttagagtgtcggaggggcgtcatcaggctaattacagccgaagcatagtgcttgagaaggaacacggcatcttggggcagggctttcgtggtacccgttgaagaagtaaaaagattaggtaatattggatgattgtaagactgatctggaagacatgatgtgggtaaatatccatggggtactggatcgtcttccacggaatcttgatctatcatggcgtctaaacataccagggaaggcggactgggaacatgctctggttgatcaaatgtgaagtgcgttaaggactgagaccaaggcgacagaagcatgtcggacgaattgctgaatagaaccacatcttccggagaactggactgtgtctcttcaaagtcgttcatagctggttcacgcggaattgtgtcttgaccttggtttgatctaaacgccccgaatggaccttggtggatctcgatttcctccgaagtagttgctctttcgcattcttcatcaatttgggatagaatatgatgggttttctttggaggagcgcttgagacaagccactgactcatgcgttctctttccttcactgtaaacaatggtcgacgaaaccggaccccatgattgcgtagtgagctctcaaaatcaaagaagataactttcttgtatcccccgcaagctaagccaaaatattgacacattgaacattctggacgtccttcgtcgcatttcacatgtctacttcgacactattgtgtaggttagatatgcattatcatgactcaatgagatcggcggacttactgtgacacaccctgtgaatgagcgcgtatgggtaatggcctcgtgtacaccttcttgaggtgaatctgccatctttcggtgtttgaacaaggaaagtgttgtacaggagtctgcgggggaagtggatcggtagatcgccgatagcggaaacctgcctgtttcgacggtgcgcggtcactttcctattaggttggactatctatgcagtagttgaaggtcggaatgtcgctgataatgtgtaattctccgtgtttccccgcccactgcattgggatattctcaatgggcttgccgatataatgaaaatgccctaaataaggctatcccacaacatccgtgttgattagttccctttcgctcacttcgtttgtttcagggcatatactttcgtgtctagtgacgacctggcctcttgctgtaacagtttctatttagcctagctgctaacataacatctcggtcattgatttatgtcttagtagattgaccaacattcagtcgatctttatcccgactttcccaaaatgcctttgctccgacatatactggtatgcacttttgagatcctcgagtctgaaggtcttttgatccatcacaggatgaatattatgcgcctcgactgcgcggttcatttgttcaaactgagcacgcgagcccactacaatgctttgaacagtgcacttggcgctaaatgactccagcagagtaggctggtccccggatttactaacgtaaccaatgcccgtaatcaggccggcgattttgatagccgccagggactatatagagatgttagtggattgttcggggtgtaattgaatcaaggactataatttcatacctgtctcagcgtacctggcccaccgacctcgagaatgtgagagacacccgccttttcaggtgtaaggcttttagcagtctttccccaatctgtcgtcgttttatagttgatgacatggtccgcaccaagctccttcaatcgtacggctttctcatcagatgaagtagtcgcgattacggtcgcgcccgcggcttttgcgaactaaagggaacatggaagtcagtttattcagcgggatcccttgagcagtcgtcgcaattggtttacctgaattccaaaaagactaactccaccagatccttgagtcaaaacaacatcaccaggtcgaagagggtgatcagcgctgccgtaaagtgcattccacgccgtgaggcccgcgcaagtcaaagtgctggcttctaggaagctgaggttcggcggcatagccaccaggccctcctcggagaatacaccgcgctgtcgaaaggtcccgtctaaaaggccaccaagcgcagttttcatggagcgctggtcaagggggccagcatggtggccctggttgaacagcgtaatcaccttatctccaacatgaaaacgagacactcgcgatccggttgcctccaccgtaccggctccatcagatcctggaataatattggcattggttgggtagcgatattcaccctgtacgagttaagtgggtaaaccccagtggtcgtagctctcgtcctggacttactgttgctataatcaagtcacggtaattaattgaagcggcgtggactaccagagcgctagggtcagtattactttcaatcaaccgtcggatggattgtcggcgtacatcggactaggacatcgtttgggcccaagtcgggaataggaacatttttgctgaaatggagaccgtcgaaccctgtctgtttttcgaccctccattcattcgtagtaagtgagcccatcttgcaggtgatgatttagcgagaacaacaaaataacatcttaaggactacattcagttatagatccatccacggacctctctggtgctttgtaatctgatcaatgacctcgttgctttgtaatagacgggtgaatacggcagtcgaacttggtccaatggggggcttacagctgatcgaatgttcaaattggcatactggcctgcgtttgacctccccgaagtcatacacaatgtatactcagactcttggatcgcgtgggcgaaggttacctgtcccaaacgtcaatgacgaagacaataatttatgattgcggtccgctaaaaaagaaacaatatacgtctttgagcaagatttgcttgatgctggaaacacatcgccagaagatatgactctggatgcactgcatattgcagcggagaaggacacatggcaatgatccaggtctgtttagagcgcacaaagatgaatgacatgatggtgtttgagggttccctccgctcaaaatgcacatagtccagtcgcttgataccgacaagctcaatgtcaactcacaggactccctccctgcgttgggctcctttgcatctggctggtatgaatggtcattttgctgctgtcatagcacttcttgatcacggagatgtagaccccaatgctgctgatgaagaagaatggactctggctttttcagtctttcgagagaaaccatctaagttgactttgccgaaggacagaccggtttttccacctggttgaatagatccagacaaatgggcacctaacgcaagtcggtaattcagtgaagctgtctacgcttgggtcacgatttgaagagagaagtccgtcatgcatgctggatgtttcagaaatgacgaggttattgattttctcattgccaatataagtctctcgaacatagaatcatgaattatgagatgtcccggcccaacattgtcaatatcgaacataacacaatgatgtagccaaggccttttgtaggatgctagaatgaaaagaaacaggtgtatgtcatcgatgcctggaaacaaccaagtcgggcagacgaaaaaaggaaaagccataacgcgccaggaccagccaggaagaaaagcgggtgaaagatagaaagaaacaacagtcaagaaatgctccaatcagggcgaaaacacatcgtagcccccccaacgcaagacagagttatgtgtcccatttacatctgtctcaatccctctgcaagacgccgcttgccgaactcccaggcgttcattagaccttgttccgtgagatcgatattcttcatattgggtgcatctgcagccggtgcgcggctgacacgcgaagcgatcatgaccgggtcagtctcgaggatgattccgtcgtcgatagtctcgtcaatggtcagggagaggaggtcgtagttctcaacgatagtgcgcttgtcggttgcgcccctgatgagcgatcctgttagcatcggtcgaattcctcgaattggaatcgaaacttgacatacttgaataagatccccagagcatctcgtagtgacagtacaacattgtagagcaggacctcgttctcgtcggcacttccaacaacgtaaagcatgacgtcgctctccatcttgaagaccacaatgcggttatcgtaaaggatgacatcgcttgcggacttgttggtcttctcaaggaggcccttctcgaaagaacgctgctccttcacggtagggtaggggttggcaccggggtaatcagtcgagtttggtgcagcgccggcgggggggtgtggtgccgagaagtactttgcgtagatgcgggacccatcgtcagcggacatgacgaggaccgcatttacggagaacaaggagagggaaccgggcatggtgagttttgtggtgggagcaattggggaaatactgtccttgtgcttgttgatgctctcaaccgccaatctggccggaggcggagacgcactaatgttgttccgtcttcgagctctatactccgtacggatacagtgaccacagcacagcgtaagtgggaatgaatccacacttacggagtattcatctctgacatggtactaggactcagtcggcttcgggttacttgtttattaatcatttgctacattgtcggtacgataacgatatagttggcaatataaccaaccattcgttggccctaatactacaacggaatactagattaagttacacatctcaagattggggatatgacataaaatgagtggaaatacatcattgtgaaggatacatggggaataatatatatcaagataaagatcataatgtatgagactcctttcgaaaccacatcgcatggggaaacatcatgatcagatcgcgttaaaggaaacatgagaaatcagggaccttgaaatataggcaaaacatttcaagacatgaaattgcgttatgtgcatcataggggggtatgggtatgttaaaaatatggtcaaagaccaggttaagatcacatcaaatcatactgcccggagaacaaggcctactgcggcgctggttcatcgccggcgcgattcaaccacggaatccaactcgcgcggttcgccttcttacgtgccgcttcttcctcctccttgattctagcggtttcgctgacaaggcgcagagggcgcaacttgtcctgttgcatcaccgctccagtgtagttgttcatgccgccactggatcgaggagtgctagaggtggccccggtggaggctgtatctccgtggggatcgcttgtcacactgggggagctgctgcgaccaatccgctccggctgactggacatggaaggtgcacggctcatgctagatatatagcttgctgctccggagaacatgctctggcgggatccagggcccattgcagtcgggctaataggtccgccggagttgcgtccgccgcggtacatgtgaccaatgacactcgcggcacttgggtcgacttgttccgagcgactgcgacggtgggtggatgctctcacagactgcgtacggaagggaatgctgggcgcagtgttggggttctcattggggttgttctgtggggtttgcggtggaggcatcatgctggttggacgcgatcgaggttgggttgaagggcggggattctgaccaccaaccatcgacttcgctcgttgtatgagaccttgtgacgaatcatcatctttatccgaaggaataggggggagttccttttcactgcccccggtcttcgtggtggaagtttcatcatcctcgttccggtccagtatatgctcaaatccgtcatgcataagcagtctgctgataatacgctctatatagagcgtcagggctttgttctgatctttcagagccttgacctctccgtccggttgttgagcagcatcgctttcgggcgcctcatctacagattcaagctcatctgccaaggaccccagccctcctgccgactccttagtggggttggcatctcgcatgaaatcgcccttggcaaagtccccggtaagagtcttctcgctgagaagaagttgatagctttcattgtcctccatcaagcgagcattggccacgcgggcctcgagcaagtccttctctagttctcgctgacgaccgccaccgttctccatctcgacgagttttatctgtgattcggccagttcgaggcgtaatgactcgatgagtttgtctttctggaggagaagtgtagagttgttgcgggacgggctccgctcgatgtgcgaggagggcgcaaattgaccgtccacgtccggggaagatcgattgcggaagctcgctatagccgaggtcagtctctggatctcatcatctgcgattgtaggagcatgggtgtcttacaagatcgagaaacttggttacgatccccttctgcattcatgcgcatgtccttctgtgccatcgcgtccttcaaccgttgaatagtggcctgcatttcctcctcccgactagtctgctgttctttctcctgaagcatagcgttccgctccgcctcgtggttctgttccagatcccggatctgacgaccctggtcccgaatgtcactgttaagggcctcgatccgactgtctcgctcatgagcctggtcctccaacttggtttgttcactgatcgcttcatcgaggcgcatttgcagaacgccgagctgcttttggtattgttcagatgcagtttcggccttttggagttgttcccgcagttcctcgatgagggcggcattctgagcccgcgcctcttcttcggaggggtcattggaaactcgcggtacgtttgacatgctgaggttggaacggccaggttttcttgcagctgcgcgggctgatacgggagtcgaacctcttaaggaaggagaacggttaaggctagttgcgctgggtgagcgtgcgtgccctcgtgcggacccgttgttggagtgcggatctgcggttgatgatttgctggaactgccgggagttccaggctttcgaggcggtgctgacatgatgaaacgacccttgacagtccgctggtgaatgtataagaaaatgaaacgtatatagccccctattatacttcaattgggaaaaaggaaagaagatttcagggttgcaagtgtatttaggagcggtcaaaacctagtggacaccttgtggagagcgcttgtatgggaagattgaagggccaggaatgtggttgaaagctgtcacaggctgattgcgtgccacatggttgttcggaattggagattcatcgaaaacagcgtgaaagtcggaatgagaaaggaattgagaaaagtgctggttgcagaccttcgaatcaaagttgtcttggggaatgcggatcccttactgtatctaaaaatacgcaacggcttggaacaatacgagagagtaaggactttctggaagaggaaaagagaagtcacaaggggaaatttagtgaaataaggaggcgaagtcggttgtttttcttgttccaccgggtcgactggcctgctgagatggcgtgggctcatgaaagagcagtacaaaagggggatagatgcctgaggccgtgtatcggactaatgtaattccatctccacagcggaagttgacactttgctccactgcacctgcgcaccttgtccctacaacatatgctggaacagtcgagttcgagtacggagtatctgtatactacgttcggatgcatataatgctcgccaagaccctaggcgtcatctctcgggcaaccatatgagtcacttttgttatcgcaaagtttaacaacgtgcatgcaacggatcccaagttgggtatctatcacctgcacactcccaacccctagcggtcaggcaacgactcctgaaaatgtcaggtgacccacgatccaatgatgttgaactacctatttaggtaggttcaatgttcttatgtattcttaacgaattcaatcctggttctggcagggagggcaatatgagctgggtttccttgaatttccccgaggtttatgtcgccgacacaagagaagttgtgtcatctcaaaaaggaagttttcgccctcccataagagaattgcagtttacctcctgcccgtaggaatcaacagattaaatctagtcactgtagtttccccagcatcataaatctgaacgatacatatgtatagctatgacagctgggtggacgaaacctccaaatatagacatttgaatactttctaagccactgtgtcttcctgaacttgatcaacatcagcaccccatggcacgttccccgagaacgacttctggttctgattgcctggttggtctgcatcaaagtccaaacggtccgggatccttaaaccggctgggaaatggcatctcacaaaccatgtcgatactccatcccggtacagccaaggatcttctgtccgtcgctgccatgtttccagtctcgtcctcagatcatcgagtacagtagcatgttctgggtctttggcaagattgatcacctcatttggatcgttctccaaatcatacagctcttctggtgcgcggaaaaagtaatccttgagctttctctgcccgatcataacctcgctatctgatgagttccgaatatcttcccaagaaagagacccatagatgtcagccgcaaatggaaagtctaggcgccatgcgaggtttcggtggtatttgtatcgtcgatctcgaatgaacctcgtcggccagtagtttgtgacttcgtggaaagtatgtgagccgaatacttggttccactccgatttttgggcatttgttccgagtagcggaagcaacgagcgtccaagccgcttctttgctgggtcctctacgcccggatgtccaacatagtcaagaacggtggggaggatatcgacgtatgagaccatgtcagagttgactgctggctggacatttggatgcttgataataagaggcaaccgcacccctgcatcgaaaagagttgttttagagttgatgaaaggtgggccgttgtcgctgatgaagatgacaagagttgattcagtcaagccagcctctttgagagcattcaaaacaaaagcgatcccttggtccaggcgatgaattgagttatagtactcagccaactcgaaccggacacccggagagtcgttgataaaaggtggaatctcgaccagatcgctattgtaagagcccttcttgatccgggagtcgtattcttggtcgttgccaaatccacctcgtgtgcgatcgcggtgtggatcgtggaaaccaatcgtcaagaagaaaggcctctcatctgccagagactcttggaagaagtcattggcttgatcagcgatcacagccacatccctcgtttcactctccttggcgacctcccagggatagactgccaccggtccgacatggatctttcccagaatacctgtccgatatccgctctgattcagcagctgtggtgcagtttcgacatgatcaaacgtgacaaagtgatggcggtgactggcaagtccgtactggccgttctggtgggtgtatatatgacggagcggctgccactacaggacgcggtgcttgcaaaggcatattcaaatttggtaccttctgcggcgagatggtcgatattgggtgtcttgatagttggtgtcccgtaacaaccaagttgcttaccaagatcatcggcgaccatcaacagtacattctttctgcttgccatgatgacttggtagatcgagtgaaagctttctaggcagctttttggggggaggacatggagagagaaaaccacccgactcaaaatatatttgctattggtggatttactcggtttgaaactagcctcatcttcgctaggcttgctgtgagcgcgagctgacaccaagatgatgtgattgctagtttagacctagtgccgagattggatactatgcttaccaattcttggtcttattatgaaaagactaaccagttactgactagttagttatcagatatcgattcaaaatgttgtcatctgcagggctcattgctcatcgtactaacgtctcaagcaacccacttttttgatagaggtatactaaccagcctatttgacttgaaaataaatcacgcataaacgatattatccgattgaatcatttcagagaatttgcctgtcttgtcaatcgcgaatcgcggccgatactagtggatggaggaattatggcgtctttcattaagaatattgtgttgaacggactgaagaccgtatacagactaattgtatttgaaacagtgcagctactaaaaccaggcctctagctagaaataccacaagataggactaagagtgaaaagatattgagaacatatccaccacgatgaaattcaccagtttgcttctgctacccttgttgcgtatcaccgttggccaactcatcggccccgtgggtccaacaaccgacctttatgataagacagtcgaatgcaacatccttgattatggcgctgtagctgataacaagaccgacatatccactgcactagagacagttttctcggaatgtgttcgcaaacatccgggtagccgattaattgtacccgaaggagagtatttgatcgagcgaggtgtgactctcagcaatggcacaaattgggcattccagttggatggtctgatcacagctgcatatggcggcgactggaatatcgcgcgtgagttgatactccaagggtttgcaggcacagagattatcaatgcaaccatcaacggggagggtgattctaaatttttattagatgtgctcgtcattgtcaatggtgagttcacatctccagacatctttggagcccaatgttgacaaaacagctgtggatttcgagttctattcttccaatggcaaaggtgcctttcaaggacagggttatctctaccgaaatctcaacaagtaagttatagaccattttatgagatgttgtgaagcttatacataaattccagcacggatcgcccgcgcttggtgcgtttgatctctccgaccaacgcctcagtgcatgacttgattctagtcgacagccccaagtttcacattatcttggattttgccgtgaatgttgaagcctaccatttaaccatccggggaggaaacctgggcagttatgatggaattgatgccattggaacaaactattggattcacgacaatgaggtatgcgtctcaacccctggtcttcatctttcacctgaactaatgatcattctaggttaccaatcgggacgaatgtgtttccgtgaaaagtccttctcatcatgctttggttgagaacctggtgtgcaatcaagcaggctctggtatatccattggcagtctgaatgtatctgctgaaatatccaacatcgtcagtttcaacctgtcgatatcccatcaaatgctaatattgcagtaggaagcacgcaatatcagcattatccaaggcaacaacatagccttcatcaaaacatatcctggtggatccggctacgttacaaacatcactttttcgaatttccgctctctggggagtctttatggcttggatatcaaccaatactggcagaatacgtttgagcccgacaccggtgctgttacattgagtaacctggttttccggaatttctctggtaagtcattgacaaatgttagttctggcagtattcttacaaagtttgtcaggctctgttgccgatggagtgaagcgtcctccactttacctcatcgcgaatgatctcacatacgctactaatgtcactgtcgaagatttcaccgtgtggacagaacagggtacttcggttgtgaacaagatcagcaatatctttggcaatggggatgatagctacgggtcaaataatggtatcaagtctctcggtgaaggagaatcgtcctcaccttataccagcacctacaccattacagcatctccaactgactggcaggcccccacaactcctacgtgggctgttcctagtacgggttatggaagtaagctctctctcggcttcttttgtgtttcttgtcctaccagataactaatttctctacagcggcatctcctattccggtctatactccagctcctctgtggcgcccaggtggtgtggattatgatttgcattactggggaagcttctaggtggtagcttatcgaatcgagtatgcgacgatttggacactctcatttgtttacggggtatgttctatagcgtcgcagtgatctttggtatgcgcgaggctgtataggtgttatctttagtcaatgcatgtagaagaagagaaaatcgattattcgtggcaaagaagacagattcttccaagatttgaatgatatctagtattattttctctaagtttgtaatgatcaacctcagtattggataggtcaaggaacgccgttatccctacctaacttagtacgtattttaacttcaatgcacaatcacaccgaagcatagaattaagaccccttcgcatggcgtcagtaaataaatattttgtagccagaactcgagtcggttaattaacaatgccgtgaggtagaggtccgatgaacaagaccgactcgggagggagtgccgatgttgacagtggcgttggaatcctcaattctgatagaaatccaaggcgctagatatatatgtacattattgcaagacaagattttccaccaatctgagcaaatttaattcaacttttccaccgctagttgcctggacttggcagagattgatgcaatcaggcgctatcatggcgcaaaaatatcggctaaatgtcaaggcttgttttcattcatcaacgacaactatctttgatcaccgagcatcatttagaccattatagcgtcctttccaaatcgctaggaggaattcactatctctccgttgggagttcctccgctggcgtaaatggcatcatgcatatacttgagcacgcattttgtaccttgcagtctgagtcggattgatattgttcttcatttaatctaatataaagtgttctatctcaatgtatatctttgaatccagtactctctgtctcgttcttgattttcgactcatgcgccaaagatagccatggcatcgacattttccaaagagcttccagcatcggattctgggcctcagaatgacgatcatcatcacaaagacggttctgtggtgacaacccttgctgagccagaggaacaacgcgagtccctgtcgctgttcgctgcacttttcttgcggaaacggaaagtcgacccagaatctattgcaacagttcggagtgtgttcgatgatcctctgttggcgcaattttaccaaccccgtccggactacgagaatattcacagattcgatccggaagaaagatggactcaccgtgaagaactctcagtacgccgcaagaccgattggaggattttcttgtggattcttgtcatgttttttggactcaatctcgatcgaggaaatctaggcaatgccgcggctgataacctgctcgacgatctgaagatcaccaccaacgactataacaacgcgcaaaacatgtatcgtatcggctttctcattgctgaggtaccgtctcagatgcttggaaagagattgggcccagaccgctggattccctttcagatcatcttgtggagtttagcatccggaggccagttctttatgcagaatcgcgctggcttcttcgcatgtcgcttcttcattggcctgttcatgggtggcttcatcccagatgcagtcctgtacctttcctacttctataccaagtctgagatgccattccgtcttgcattgttttggttcgttgattccatgtcaggtgttgtcgcctcattcatcgcctatggtgttctgcacatgcgcggtgtggacggccgcgaaggttggcgatggctgtttctcatcgaggccctcattagtctcgtgataggattcctcagtttcttattcttagtaccgggccctacccagacgaagacttggtggaatcctaagggatacttcaccgaaaaagaagaaaagatcattgtgaatcgggtgttgcgagatgatccgtccaagggcgacatgcacaatcgccaggctctttccctcagcatgttgtggcagagcttgatggactacgacttatggccgatttacatcattggaatgcttttcgaaatacccacagcgccaccgaaaacttatctgacgctttcactgaaatcgattggatttagcaccttccacaccaccttgttgacaattcctgtcactgttttcgcctccatcaatttggtgcttgtgaccgagttgaccgagcgtttgcaggaaatctccattgtcggtcttctcactcaggtctggaatctcccacttctcatcgtcctttacacatcagctggatcgctatcaagctggggtttgtatgcagctagtttcatactactgggctggcccaacccgcatgcagcacatgttggctggtgctcacgcctcagtaatactgtgcgaactcgaagcattagtgcggcgctctacaatgtgaccatccaactttctgggattgcatcctcgaatatctaccgcagtgatgataagccattgtaccgccgtggaaactcacaactcatcgctatcaacgtcactactatggttgcctatgttctggcaaaggtatactacgtgcgcaggaaccaatggaagaaagctcaatgggataaattgacaccagaggagaaggcaacttatctgagcaccactactgatcaaggaaataagcgattggacttccaattccatagttgagcactgtcccaaaatatctgctatatctctactttggatccgagctcattgagatgttgtcttcactatatatcatacatcaagaagaaaagaattgtgtcggatgcagaaagctcaccgtgcattatttcaagttcagctatgttcaaaatctacgtaaagattcctaatcagataaatacatcggagaaaggggcatagatctctcattctaagtaaacctccaattaaccaaagtatcgaatacacaggtgttcaatttcatggccttcaagacaatgtatttatcaggatgtacatcagtagggataagcttgtggatcaaaggtaggtcgagatctcaacattgtttttacttcttcttagctatacctaacaaaggactctgattgtatctttatgtcgagctggtatattttagcttcttgagcgagctacaggtaagagaacataaaataataatacatacagttctaccgcaaaagtctccgtacgacccatacccattacatatatatctccgtacggagacttttgcggaggaactatacaaccgagatgcatccaagagagcgggagtgctccaaatcagataaaagtggaccgaaacaggattagtggggaatcttgttgaccaatcaaaaatgtggagctgtagcctgggctacggcctgaggactaaggcattaaatagggttaaacccttttgccacagtgctgcttggaaatcaagacccgtgaccacagcgaaaccctctttctctttctccttccgaaccctcgacaaccaccgacaacctatacccagttcgcaggaagtgccatcaccacccttccaacactcaaaatggcccgccgtcccgcgagatgttaccgctactgcaagaacaaggtgcgtgccgattcgatttcgcgagctttgaagatttgtgcgggctaccttggtggtggggagtgtgcatcaatacatcgccaacgaccacctcaccatgaccggaatagcacatttattctcatgcgagatatgcgtggcactggttgtggaaatttttggggaaattttttcttttttttaaggtccgcagttttcgctgacatcagtcttcaacatccagccttaccctaagtcccggttcaaccgtggtgttcccgaccctaagattcgtatcttcgatcttggtcgtaagaaggccaacgtggatgacttccccatgtgcatccacttggtttccaacgagtacgagcagctgtcctccgaggctctcgaagccgcccgtatttgcgccaacaagtacgttactcgatctgctcccacatctttcgcctgacattcatggacatgttctcatataactttcaataggtaccttgtcaagatcgccggtaaggaaggtttccacctgcgcgtccgtgtgcaccccttccacgtcgtccgtatcaacaagatgttgtcttgcgctggtgccgatcgtctgcagaccggtatgcgtggtgccttcggtaagccccagggtctcgtcgcccgtgtgaacattggccagattattctgtccgtccgcactcgtgacgcccaccgtgctaccgctcttgaggccctccgccgttcccagtacaagttccccggtcgccaaaagatcattgtctccaagaactggggcttcacccccgtccgccgcgaggagtacctcgagctccgcgacgctggcaagctccgccaggacggtgcctacgttcagttcctccgtggtcacggtaccgttgaggagaacatgaagcgtttccccgttgcctacgagaatgtcgcttaattgttgatgggttgatcagaatatgaagttcagaacgaaaatacttgagtgttcttattgtctttaccttgcctcattcctcttgatatcaatctcgtgcaatcgcaatgatggagttcttccgggagtcttttcatttgctcgcctaattgcactcgtagatctgtttatctacctgggcagtaccgtaaactatgtattatttttgttgccagccctggagtgggcaacatttgcgctttcgatcatgcacggatcatgcgaggtgcagtcatctggtggatatcattcttatctagcaaaactagcaaaagtctagaccgaactccatagtgggctttgttcaacgatcagcaggaatatgggtcacgtcaccaagactgcagcatcacccccatcatacaacatgtcctgcgggctgtattgctgatttcgtggagtcttcattcatgcagctgaatgattaaacggtgggcaattcgagtgcaaaaattaaggacagaccaatgtgaggcctaggatttagcatatatattctaaggttagtattacgcacttgcattcaccgctatcattatggctagattaggtttacgttggcaattaggaattagatcaaggctcattcattgttccaatccattatatccatcctttcgaaaaaaaaaagatcgtttggacatcaaagtatatataacctccttactgaggcggcgacccaccacaacgtttcttgtgcaattctccagcaactaaagggaaacaattagcccaagtcttcaaacaattataatctcacagagaccgattggaaaaccaatagaagcaaaagcgcaatgtgtgaggagaatatacctgtcaagtctgccgcagtacaagaaaccttcaaacaggtaccgagcgtatccttgaacgctgggcttgggcaagtgcacttgtagtcaatagaggagagacagcctgctactgcagaggcttcgttgagacaacgaatctgtttgaaatacgaaaaggtggtcagtcttctgagtcaagtcatacatcctggtaagagacatacaaggcagggactggcatcatccagaggatcagcgacggtccatgacaggaacgcagccagcgggaagaaaatagtgagcttcatgttggattggtgcgaaacgtgggtttagtagtggtataatgatagaagatttggagtatgaaagtggaggagttgatgaacacaggacggccttgctcggtttatcaatagtcagtatatttgtgtagtgataggagagacagtacattcttcgtcaaatcggtatctcagcatcaacaaacccggtgcctgggtgatacgtggaatgggtttcattggaatgtgagaccagctaagcttctgaaactgtcaaggttacaacgagagataatcgattggataccacgtctatttcttatccagtcggtacatattagcatgttggcctatctgaatgtcgtaagcaaagttagatccaaacaatacggtcttgatttttgtgatgtgacttcttggacactagggagattcttttggaacggccacaatcctaaataggacaccactcttgattcgctagattatgagcggctttatttatgggaataccatcgactgtagagctccaatatcctctatccatgtgcatgcatgttgcttaatttctcggaacgacttacgacaggccccactactacatagctttggtttcagtactgatctgcttgttccttattcaacggtatgttgatttcagaatggcaggactgaaaacattccatttgatgtctctaggttcgggatattccggggacattccattcaattcgatatccccggagcaagaaatcgagacgtccagtggttcttagcaagttaaacaccaaccgaggggaattcccatcgaaagttaaccatttctgcagataaaccagcctattgctgatagtcccctgacatagtcctcgccggctctcgtaccttcagaagaaaatcagccgcagaccaatgcttagtgtatgggatgaggatacgggggtcttcagtcctgtcattatctactttcctcttttctttcatagacgaaagagctgaagtatataaatcatacgcgatggccgctattcccactattccaaattaggaccccgagagcaaataccgggctttgattggttagattacatacaccgccaaatatcccgccttgaccaaatacgtagagctatccaatctcctatatttctcttattatatgctatttttcctagatctatatgctgtacactgagaaattcaagtccaactcagaggtacaagtccacaaatttacgcggtcttcgggatctacatacctatcacaggtgagtggggtagatgtccagttttctgctgggcagtattaactcgcatggtcgcaaagctagtccacgggttccagccccgcatacgtcaccctcaaaaatcctttttctcctcacaaacacagctatgaagcagagattctcatctttagacgtcaaggtatcttcaaatatgtgtcgaagaagatatcacactaacaaccccaggtcatcacccaggaattggcgtcggagtgtgtcaacctccgagtgtccaacatctacgacctgtcctcggtacgctcaattcttttctctattaccatggaaggacggcgagctgattatttattcctattagcgtatatttcttttcaaactcgccaagccggaccatcgacgccaactcattattgactccggttttcgtactcatgtcactcaatattcgcggaccgcggcatccacaccatcgccctttgtgacccgtctccgaaagtacctgaagtctcgtcggattacaggcatcacccaaatcggaactgatcgcatcatcgacttctcttttagcgatggcgcataccatatcttccttgaattcttcgccggcggtaacattatcttgacggaccgcgaatacaacattattgctttctttcgccaagttgccgccggtgttggtcaggaagagataaaggccggactcaagtacactgtatctaataaacagaactatgatggggttccagacatcacagcgaatcgggttttgcaaacactggaaaaggcacaggggctttctgcccaagaggaaaatgcaccaaaaaagttcaagaaaaagggaacggatgttttgcgcaaggcattgtcgcaaggctttcctgaataccctcccttgcttctagaccacgtctttgcgatcaaggaattcgatactacaacgccactggatcaagtcttggggagcccagatctgttgcagactgtgaaagaagtgctagaggaagcgcgtcgaatttctaacagctttgattctggtggcagccatccaggctacattgttgcgaaagaagacacgcgacccatcccggaaggagagacatcgtcaaaggccccgggtctgctctacgaagacttccacccttttaaacctcgacagtttgaaaacaaaccaggaataaagatcttggagttcgagcgcttcaatgccacagtcgacgagtatttttcatcccttgaatctcagcgtctcgagtcacgattgacagagcgtgaagaagcagccaagaagaagctcgaatctgtgcgatcagaacacaagaagcggattgatgagctcaagaccgtgcaagaacttcacatccgtaaagcggatgctattcaggacaatgtttaccgagtccaggaggcaatggatgctgtcaatgggctcgtggctcagggaatggactggggtgaaattgcgcgcctgatcgagatggaacaagatcgcggcaatccagtggcgcaaaccattaagttgcccctcaaactgtacgaaaacacgatcactttacttcttggagaggccggtgacgatgaggatgaagacgaggagttttctagcagtgatgaatcagactccgactcagataacgaagcagaacaagagacaggtcgtgcggaacgagagtcaaatctattgaccattgacattgaccttagtctgagcccatgggcgaacgcatcgcagtattatgaccagaagaagcaagcttcggagaaggagcaaaggacaacgcagtcgtctacgaaggcactgaagagtcatgagaagaaggtgacgaccgacctgaagcgaggcttgaagaaagaaaagcaagttcttcgacaggctcggacgccattctggttcgagaaatttatctttttcatctcttcggagggttacttggtcatagggtatgtggctctattcaacaccgttttatgaaatctactaatcctagtagtgcacgtgatgctatgcagagcgaattgatctaccgtcgttacttgtctaagggcgatatatttgtgcacgctgacctcgaaggcgcgacgccaatcgtggtaaagaaccgagcgggcagtgcagacgcaccaatctctccaagcacactatctcaagccggcaacctttgcgttgctacttccactgcttgggattctaaggctgtcatgtctgcttggtgggcgcatgctcatcaggtatcgaaaatcgccgagaatggcagcggaatcatgcccacgggtgtctttcaaatcaagggagagaagaacttcttggccccatcgcagctggtacttggatttggtattatgtttcaagtcagtcaggaaagcgttcggaaccataagcagcgatttgaaacacctgacattccaaacgccgctataaatcctgcggatgagactgaggcttctgagccgaaggaaactctggagccagaagcctcggggcagacagaggccaccgaagaagctaccgaagacgcagagaaggaagatgcggaatctgaagaggaagacgaagatgagaaagccgctactagaaaccctctccaacgaggcaattccgagctctcggtctctcagccaactcaagaattggcgtctgagtctgagtctgagccggaagaagaaccgaaggatgagctggaaaaagaagtcggagaagttcagggagaagaagctacaccagcagcaggtcaaaattctgtgcccgagaaaagtgaagaacggaatttgaacaatcgagagcaacgtgcctcgggacaaggcaagcttcttggccaggaacaacctgcaccacgcatcacccccactcgcggtaagcgagcgaaggacaagcgcgctgctgccaagtatgctcatcaagacgatgatgagcgagaacttgctcttcggttggtgggtgccaataagggcaaagctgcaaaggcggccaaggcagctgaagctaaggaacagcgtgaacgagaggctgaggcgcagaggcaacgacgacgggcccagcacgagcgtgctgccgaagccgagcgcaaacgccaagcccagtttacagaaaatggaacggacgattacaacgaggagacagctgccgccgaggctgcggatctcacatggattccagcattggtgggtacaccaactatagacgaccaaataattgctgctattcctgtatgtgccccgtgggctgcccttggacgctacaaatacaaagtcaagctacagccgggctccgtgaagaaggggaaggccgtcaaggagatcgttggtcggtgggtgtccgagaccaccaccgggaaggtcaagaaggagcatgccgaagatgtcgggatctctcgtgtcgatgctgagcgtcttcgggaacgggaaggagagctcatcaagggctggaaggatacggagattatcaacactatggttgtgggcaaggtgcgcatcatgactgcaggagctggaagcggcggcggtggtgataagggcaagggcaaaggtggaaagggtggaggtgggggtggaggtggcagaggaggtggtaagggcaagaagaaatgattgggtcttgtgtatgtattaggagcacatatattagagcattgtattcaattcaaccaggatatacgagatatcctaattggtgttgagccgatgtatagttatcaagcctggtctctttatgactgctgatctgccacaaccccgcttcgacccgttcatatatacttatttcaacctcatatactatgaataactcccattccatatgtattgccaataatatcattggcgacgtgacgatgccccccgtgttcctgatgcgctgagtcatccgacgtcatgacccgaagcgattttcttgcgatcttccggctctcatcgcttctgacaagattgtgcagaatgacagccgaccgcgtacgctgagacgacctctcattctaccttcaatagaagagagtttgccccacgcaactagagccaggcctcttcaggcatcatttcgtccctgatctggtagtgtgtgtgcctgaatggtgcatcattgaggtcttctcaaacaccacgttgctttccactcgtgcttttgccggccactgtcagcgcagttgtgccagattcttgaccagtatgtctatacaaacgcgggttgtccccgtccaacggctcagccaagggcctggcgatttatctctggcggaatggtgggagaaggagcgcagccaaaaaacgcccgagtcccaggccatcgaagaagctgccaaacttctccggtctagtgacatccccgttgcctttcctaccgaaactgtatatggcctaggagccgatgccacgcgcagttcttctgtccagggaatctaccgagccaaacagcggccctcggacaacccgttgatcgttcatgtcgactcactggacatgcttgagcgtctgcttaatcctacctcccaaggcagccctaaatcaaccagaatgctgccaatggccctcccttcaatctacaagcctctgatcgacagattctggcccggcgcactgaccatcattttgcctaacccatccgggtccatattggcgccagaggtcacctccaacctgaccacattcggcgtccgcatgccctcttctccactggcgcgtctactcatccacgtaacagatcgccccctcgccgcgccatctgccaatgcgtccactaaaccatcccccacaaccgcgcagcacgtataccacgatctcaaagaccgcattgagatgattctcgatggaggagcatccggcgttggtgttgaaagcaccgtggtggacgggttatgcgacccaccggcgattctgcgccccggcggcgtcggcattgatgaaatccggaaatgcgcagggtgggaaaatgtagcactcggctacaaagacggcacgctagacgtgaaagatgttccacgcgcaccgggcatgaagtaccgccactactcgccaaaagcacgagttgtactcttcgattcgacatccaacctagttggagtgatgaagcatgtccaaaaggacttgaaagacacagccattggcgcacacaaaattggtattatccgcacgcggaattggcagctcggcttggggctcgcttcagaagatgacatcgccaataccatgacccccgtgtcttctgccattgagaacattgtcagtgtcccgatccaaatccccgtgctggagaatggaaaacccagtagccgtacgaagatagcatacgattaccatcttggctcagatgcggtctccatcgcgcatggtctctttgccgccctgcgcgcgttggacgagcttaatgtcgatgtcatctacgtggaaggcgtgtcagattgcgagggtgatctggccgctgctgtcatgaacaggctacggaaggctgctggtgctgaaatgcgggtttagccctggagatggagtccgggtttttcttttcggggtttagatagaggcttgaaaagtgtgaatattagatttcaaatatattttaacatacaatattatatattattcacgtttcatgtgcacggagtgcacatgtattgaggattatgattggaacctcttggacttacccatttggtaaacatctgggtcctgttgatcttcatatgacgtgaaattcggagacctccggggcaaaagcttatcaatagacttaattttgggattagaaagtgatagaagacagctgtgtcacgaaaatgaagagccatgataacctgagactgcagcgggggagaaagcaaactcgtccggcgcttatacctcgtcccacattgacctagaaaattctcaaatccaaggaaacttactcactgcaacccgcaacaatgtgtcaatctcctttgcacgagttcctcaaaggcctccctaaatgtgagcaccacgtccatttggagggcacccttgagccagaactcatcttcgagctcgcggcgcgcaatggtatcaccttgccgaccgacccagtctatacctcggttgagacactcaagaaacgctatgagcacttcagtaacctggacgacttcctacacttctacttcgaaggcatggccgtcctccgcaaggaagaagacttcgccgacctagcgtgggcatacttccaaaaggcgcacgcagacggcgtccaccacgcagaggtctttttcgacccgcaggtacacgaaagccgcggtgtaccatacgacacaattgtcacaggcttctcgaaggggtgcaagcgcgccgagaccgagctcggcctaagcacaggattaatcctttgtttcgttcggcatctccccgtctcgtcagccgagaaagtctacgaggagttcctggctcacaaggactttgagtctggcattgtgagtggactcggttggtcttcttcagaagtcggcccgccgaaagacatgttccgcgagatctatgcgtcagccgcacagaaaaatatcccgctcacggcgcatgccggcgaggaaggtgatccgacttatatcagcacggcgcttgagcttggtgcccagcgtattgatcatggtatccggctggttgaagacgaagagttgatgcggcgtgttgcgcgtgagagtatcttacttaccgtctgcccattgtcaaatgtgcggctgcgctgtgtcacttctgtgaaggagctgcctattcggcggttcttggaggctggagtcaagttctcgattaacagcgacgatcctgcttattttggtggttatattcttgataactactgcgctgtgcaggaggctttccacctgagtgtgctcgagtggaggatcattgcagagaatagtgtccaggggagctgggttgaggattcgcgcaaggtggagatgctggccagtatcgaggcgcatgtcgaaaagtacacatctttgcataacatcgctgtataaattcggattgtcggtgtattggtttctgttcgagttgttggctgtggtgggcgtgagcgtgggcggtgcatctgataccctgtgtttcaacacttttataccatttttcaactgaagtatataataaccaggcgaatagcaagttaaatatttattctcattcctagcggagtaccttggaagacagtcgagagtaataatcactgatgccttgtaaatcaggcctcgcatggatccatatctggacagacgactcctcacttgcacttgttgtctgaccgtcggccctgcacaacagtaccttatgcccccaaacatcccccgtggtacctggaggctcacgaggtctattttacgacccctactacgatcccagataccatataccctgcggctcgcgtcgtgtttcgcaggaatcaacccaggaacaaccccgcagcaaagcgcacgactacttaatatcttcaaacgaagccacagacagagcaatatacactcaaaacacaaaatgtccacctccactccggaccgctacaagctcgtctttttcgtcccgactgccaacgtggagcactgtaaagaagccatcttcgccacaggtgcagggtcattcccaggtgggaaatacaccaagtgctgttttcaatctgttggcacaggccaatttctgcccaatgagggcgcagacccggcggtcggggctgtcggtgctttggaacggtgcgaagaggtcaaagttgagattatgtgtcttggtcggggcgttatgctgaatgcagtcgatgctttgatcctggtgcatccatatgaggaggttgcgtatgaggtttataagatggagaacgtctagttgcgcgactcaagatgtggttggtggaacacagcgtaataatgtgatgcgactgggaagatagttatctagttctgcaatgatcaatttcacaagtatatttcaaggaatttcgagtccaataaaacagttcgagagtatcgttgtctcaaaacatggaagttgtgttggctgtcttcgaagagcaattgtatgataacggattggtaaggcggtagtaatccctggatgctgatttgcccagggcccgccccgagtaaaacgcctcgtcaacttgacttctcctccaacctccaacctcatctccccccaattgaccctcacttatcgcccgtgatggcctctaaactcttctccgtcccgcgggtcggccgccagttggttcaccagctccccaaatctcaatacagagccttctccgccggttcgcaacggttcagcgaatccctttcggtggtgcgtatttcgttccacccctcttatgcttcaggcgccgattatgccgcagggttgaggaatcaaagactcatatactgactattgttgtctctaatagcatcgcaacaaacccaacaacaacccgaccctcccgttcaagttttccgagcagaacctcacactcgccgatgagatcctcaagcgctaccctccgcagtacaagaaggctgctgtcatgccactgcttgatcttggccagcgccaacacggctttaccagcatcagcgtcatgaacgaagtcgctcgcatgctcgagatgcccccaatgcgcgtttacgaggttgcgaccttctacaccatgtacaatcgcgagcctgttggcaagtactttgtgcagatctgcaccaccgtaagcacatgaaatcaacactatttcctgctattcctaattcgcaatcctccagaccccatgccagctcggcggctgcggtagtaccgccattgtcaaggccattaccgaacacctcgggatcagccccggccacaccaccgaggatggcctcttcacatacatcgaggtcgaatgcctgggcgcttgcgtcaacgctcccatggtccagattaacgatgactactacgaggatctgactccggagtccatcaagaacatcctgacagccctcaaggactctgccaccgcaaccggtgccgccactaagattcccaccccaggcccggtgagtggccgccatagctgtgagaacagcgccggcttgaccaacttgacggacgtgcctgtgtggcacccagagacgatgatgcgcaaggacagtgcattggacgccgcgcccaaacaatagaaaagcacaaagaagaagaattattaaaaagagctcttcattgccgtgggtcaattccggatggggaggatattataatggttgtgcttttttcgaatggacacgcaaaaccgccatagggcattgcggtcacactacggtcaacttggggaatgattagaggccactgcgcccttcgccctgaggcgccctgaatcataatcactcttgaggcgtccgaatttttttttctgtctacatcataccatgtacagtacgtttgttcctggttcttattgaagtgatcggagcccggatgcagatcaggcctagtcactgtggaatatcggcaggaccaaatcgcagattttttttccacttcctcttttacactagctattgagctcgtagatgggtgagtacgtgtgcaagatattgttggttcctgctagttttatgagaatttattgcattgcatggcatcatatcgagatatccatcctcgacctccgctggctgagttagggctagtatataaatttgtctttgtcaaaacgctcaactccctaccgggctatacgttgctcgtgtttatctagccgccgagctagtatatccaatcatgttttataacatgtgctctaatccacaacattctttcttggcagacggggcaataattcataattcatacagcaggtgagatttagatagactatctgtgcacaccattttgttgcacgatttcattacttttacatgagatgtatgcatgaaggaagcaaaccacccgtgtccaccttgtttaccacgagttcttaacatgggcaaaaaaaagcgccctcatgacagtcatagcaaccggcataaaatccaaccgcacaagtggcctcgaggccatcctactctggcatctcctccccttcgcatccgatgtcgtttggtaatacttcttcttcgggaaccaaaacgtggacaccttgacgctcaacgagtttgcttgattgagcgttctggaagatgttgacttcgtatgtgttcttcaccagcaaatgatagacatggacctcgcgctcctgtccgaatcgccgtgcacgtccgactgcctgggtcatgcctgcctcaaagtcatggtcagagggggcgaaatatggcgacaagaagataacgtggtttgcgcattggagattcctttaattggatcatattagtaatgtttctaacaagaataacggataatagcagagagaaatgacttacaatccagctgccatggagtttccgagattcaagatcaaagccttcggtctagaaggtggttgcgtcatgcccttttttagtttcggagcctcagtgaactcatcgattcccttcaagttagtctgtgtgaccatgcggtggtcgatgttcgcagcttttagggcattcgataccacaggtaacagatgattgatttgcacaaagatgaggacaagctcttcctctgggacattgcggacgatctcaactagcttgttgagcttggtgctctggatttcttggtcttcgctgacaaggatttcaccgggcacgatcttggattggacaatttggccgccgcatccaatgatagggcagggtttgcgtgatccggcggcaatacaatctttgcagaggacatgaccgcaggttttgaggacgttgacgtcttctttttcttgcaagtcgccattacatttttgacataaaagaattccaatggtttggatcctcactagatgttcgtagaatcggtattcccggtcaatctcgaggacctgtttcaagagagaggtgacatcagcggacaaggttttttcgacagcgatccaaaccgaattggaaaacgcatccacgggttttccatattctgtggctctaggaggacgctttccagtcgctttgttgccagtcttcgaattttgtatcttttggaatcgctgttggagcaaatcatcaattggctggtgttgttcggcgagtttccactcactgtatgagcggatgatgtcctctaagagctgtttgaatcttttgttgagttgcgcgtccccaaaatcaatcttggcgacgccattcagggccttttgccagttgttgggatcggtatttttcaattcgcgataccaaacaatcgctgcctgtcgagtgatcgagtccactttagtccagatctcagcggatttctttttgtcattctgcgagccttttcggcacttctcgaggttccatggaggttgtccgatttgatttgtgacgcaggacatgatgagagcctcttgggggacctggctcttagacaaaatggtgctcaaggggccaggaatccgtctcttattttccttgacagctcgcaacaatgtatcgtacgctgtcttttcagcaggcgactgttcggtgacgacaaaggttgtcttcaacgggatatgtgtgatgcgtgcgatgttctgacgcgcaaatcggtcaaggaagttttgggcatgttctcggcggttttggtaccaggcgttgctgtggggggcctggtaatattggaatgcctcaacagctgtgtggttcttccggatgtttcgtagtctgctgttctgcgtcggcttgtcgcaatcgccatcgtcgtccacaccaaggtgtaagccaaggtaacgcgcaacactcttaatgtcggcaaattcacgaagagctggcgttccagaaaggatccatttagagcgtgcctgcaatgagagcagagaagcctgtctttcctccccggcatatgtatattcgtcgattaccaaacggttgaagttgaaagcgtgaataaatgcggctttgacagtgcgccagtcgtgttcggcggtcttattgatatcaaaatctttgcggtcatctttcacggcagttgatttggctccaagtttctttccgtcatcggttacttcggtcagctctgtcaatgagtgtttttgtcgctttcctcttggaccttccactgacttcctactgtgcctccgcttgcgctggcccgcttcgggggactgtctcgcatcagatgcgccaaagtcctcgaaacccgagtcagactcagaatccaaattcctttcttctcctgcattgcattcatcacgaccatttttagcatcagcaaatgcctggccacgcaggcgccgagagggcacgtaagtaaaattggcctgtgtctcttgaactcggcgacgtctggcttccaattgccgaagcattgcctcagatccttgtgttttcaatatgtcaacagactcccgcaaggaagcacgagcattgtgaaaccagctatcgaaatttcgacctgttcctccgctcgattttgcgggagcttggggtgttccggtaaattgttgaagtcggctgtagtatgcatcgttcgccaggatactccatgacaaaatcacgatatctgcatcttcgacttcccggattgtgatcttgctgatcgaggatattgccaaaactttgtattttcctccaaggaacttcttggtctccgaaacccactgcttgaagacgttgctgggcacgatgatcagtgttgctttggttgaaatcagcccgttctcttcagggggtttgcagtcgctttcatactgcgtgtcaataagaccaagaataacagccgtcttgccgtatccaacttcgtcggctagcacgccaccgcgaacaacttttggcattgtcgctttgacttcggcacgccaaggcattaaggggaggatggattcttcaacttcctcttccatgaatggttccatctcttttgcttcttgtgtaatcatccagctcagtgatcgaagctgttcatcacgaagcttgaatttgaaattgggaggttgtggcgaaagactatcgttgtcgttgctcctcaaagtaaaaatgccaggggtttcttgactcatgtcgtacgcatgagggagaagtcgccagaaagatgttactccctcatggcttgcggtaccaaacaatttaccatgtgcctgatgggtcaaagcttgcacattgagagtgaaacgcagttcagcatctccatgttcgttgattcgtctgaagaccaaaaatggcgagggtcggtttttgatggcacgctcgtagacggcagcgtcctgcggattctcgtatgggatgattcgatctctgttgtcccggccccaaaggatactaggggtgggtgggttgcaggtgttgcaattgccatttgcatgatgtttgaggtctgaacaatccgggaggatgatttcgttccagtctttaaagtcggaccacgcagcaatcttcgggaacaaccaagcgagacctttcaattctctcatagagacctctggattccaggcttgccaatcggaatttgcgtcaggtaggttgagaatcgatgtcgttgctgacagcgaggtgagagttatacaagcatcatgacagttctggttttcaatcgagacttgcattccttgttgcaatgtgtggagggtaatctgctcggcaggacattggttcagatgtgccttgggggccttggcccatcgacgacagaaagctttcacatcttgcgaatccatggtgacatttaatgatgtccactttgaagataactcggcgatcgtcattctcacatcatatccaggaaggcggtcgtgttcaagagcgaatacaaaggcatcttcgtctgctggtccaatctttgctgggtcaaggaataggaaaattcggggtgcatgggcggtagcttttcttctgtacaatgcaccaagggctgttccacaatcagggaggaattggtacattcctcggacgtcgaaatccagagctgcgacgttttgatctgatccttcaacgaaaatactgtcccagacttttccatcaacaaatttagcggctttaataccacactccgattggaatgatcgaacttggtgtcctctgccagaaatctgaagtaaaattggggtgctaatgggtgaggaaatttcccatgtaccctcgacaagcgacccagaagttggactcattctggcaattggcttggctagaacttcccggatgacgcttctcctactcgcggacttggggggcttcgcgtacaacagccactggaaggagtccggaccgatatcaaggtacaagctggaatgcgtgccgtcataaaccactcgccattttcttcctcgcttaatctcaaaaaatcgaaagacatcgtgcacagccgccttgacgcacataatgaagtcgggccaaaaccgggggaggttggtgatgtggtaaagggatctaaacatctcaaaccccaagtcggacagatcagacagcataagcttcatcggaacaagcgccttcaaattcgctatgaattcagacggcttttgtcgagaaagtggggaaacatgtagatatgaatgcgtggggtttccacgacaggatttgcaagcggtatgtccgcacagtgtgcaactataaattgaatcttggacccgagtctgtctctcgcaggagcagcacagaacgctgctcgctgccttgactttgagaacagcatggtcgataagaggtgtttggacgacttggaggttacttctcacaaggctatgggcctcgctgggtacgagaagggacttggcctccgcctcgccagagtttgttgaaaattcctcgccgtcgtcaagaatctcatgcacggctatcagaccagccagcatgattgcacacactaccgtactcgtcattgcatttcctgccatatccatcaaatcggcttgggtttctctcgtgagtaacattcgatcgaggggcagtccttgcaacgaaagagcctccgtgccagatacggggccgccgcgggttgtcacaaatggcatgcccttcggtgtcagacaccctgcgataccagaaccggcaaggctgtcattccctcgatcgacgccctgagataagtcaatccaacgcctgtgaagtgaattgttagtacaatattcctgaagtgaagattgagtagacttactccttgaagttcatgtcataatcttgaagcatcttcttcaggaaattcatatccacggtctcccacactctctccgactgtgtcttccagaaacgatgccaatagaagtccggtgtcttcagttcattgatcccgggaagggatcgagtgattggcctctcgctacctagttccagttcgtcacggtgccgttggtgacgaatctggtactgatcccagctggtttcgcttcgggactcaaggcgggctctcatctcgatgagctcgagtcggcgatcgtcatcactcagcaagaacaaccccaccggtgcactcgctggccgtttgaaacgatcagctagctcacgaacgcgttgagtgacaatttcaatgccactttgatccatggtgtctccaagtaggcccgctgcttccaagcggtgcttgtcaataaccaccatgtacccgcgctcgcgtgtctgcgggatgtagtaatgcttcgtgtcgacattgacacaaacggacatgtacctgagctcctcccacttccccttcatctgctcccagggcgcattccggacattctcctgaacgatcatgcggggtcgatatctcttcgcgtaccgcaagagaccgtcgaacgtagctcccgactcgccgccttgctgcagcgtcttctggcggttgttcaaaggagagaagtcgacacaggcagttccagcaactaatatgtcgaggttaccgggaattgcttctaatgacccgtaggcggtccgccttgaaaatcaaagtcagtattagagtcatgtcagaggaagatggatggggtacttacgcctcgtctcctccaagttcggtgatgtcccgaaagaggagaggggggcggaagtttcgctcaatgtacgactgcttgaatggaacaatctcacagctgaaagcgtgcaagatccgaagttgctgggcctccggcaaacctatcaaggtaaaattagcaattgttccatggtcatattccaagaagcaccaagcagagagtgagagaggtcagaccgagtcactggaatgaggtggaaatcattaccaggcaaaagcgatcatgccatggaattcagggcgaggttaaggcaaagttagggcaaggaaggaaacatgtgacttagaagtcgggacaaggcctcaaccatggaaccagctacaacatgaacctcaacacgaagacaacaaacgaccgactgggggaaatgggaaataaaagaaaaacgagatgctgcactgcctgcacttacccttctgtatcaattccagggctagaagcggggcttcggttcctgagcacattgtcgccactcgaagtggtcgactgccgagccgaatgaggacttgctcgagtccaatttccatggcctttgatgccatgtcagcaaaaatttctctcagcgtatgcagaggggggaggttattggctagataccgacccgaagggatcatgcgtccccgccgcagctcaggaatctcatcggccccggcactagactcctgatcatccattgccaaaccatcccccgactgctgctgagaaattccctttgacaccatgatgtgcgttgcaggggctgagaactttgaggtggtcgggatatcagataatactggcaaaccagacaagaagaaacacgctgaaaaaaagcctggaaaccgagacagttacagtaatgacctttattaccggttcaggcacgaagcaaactgcaaatatgcaaaatgatggatgaagcgatgatcgtctggaaaggtgaaagggaagacgactagaagaagaagaagaaccaaagagaaaacgagatagaaaaacactgcgcgacgccgagacaacgatcgagctacccccgttttatgcgacggtgggttctacccacgaccgcaccaggaattccggtagctctcgctcgactcagcacgacagcatgtgccggcgacctggatcaacctacgctgagaggtacacctgcgctaagatatactactgcaagacgataaccaagccaggctcgaactaattaggtaactgcatgtgacggcgactcatctccatgcggagttagagagacgctggcactgacgaatacatctattccacctaggcagtactctcaatggttgtgtgagggtagccttagcacgccgtttatcattggcctgttctgtactatcagaacattaaccgccattaaactaatgttaccgcaatccaaatggttcagtaattgatacggagatcaagccccaatcacagactaaagctaaaaagtgaactattgctgtctttgctgagtttatgtactatgctgataactacttgcttcttgaggatatagtgagaacggtctagacgttattaacggacattatttttcaagcagaagccaatgtatctcttgatggaagctataatatatagaccgacaagcaagagcttcatataacagtacataggtaccatcatttgtcggccaactttctgctttcttcggacgagatatgctagtttcccattgtgtcccttctttgatgtatcttaagtggcacagaatgagcctatggtataggcaatggagatgttatggcaaatggttataggcaccggagtgtcaatgagctcatacacttctattatactcaaatattgatatcaatgtcttctctgctgtaggtattgttatcgagattacggattatcatgccggtctcgaacgtgagtagtggttaattgatgggttggcagttatccaccgaacattgaaatcatgtgcacagatagaatttgctgaaacgtcactataagacggctgacagccattgcgagagaatgtctagataatattaattctatatttcaccatgcagcttaagcaatcccacgaatggtgaggtaaccatagaggctttctccgtcaccgacaaacgcgccaaacatattaacgggttaaggcatagataaacactccaaagggaaggcaagtttaacgttgattgtagaaacgaaggaccgaaagaatcaagatatcattctgttactattttgaaggaataccttgaaattgaccggtatgcaaatcaatgaggaaaaatgacaacccctttacgccacccattcgcctagtacagtggcataagaaaatgagaaaaaaaaataattggccatgtcatgctcgctctcgacgagcaagccacaaaatatctgaatcgaaatgcagtatcaagagagggtaataccctaccgcatgccaccctgcatcaattgctggcgtagcagcatgatctggcttctttccatgggaggcagagcatcaatagcagcctggggcatgctgaggacttgctgaaggagttcctcctggccgtgcatcggggcggcaggttgaatcgggggaggggcgaaaggagtgccggtgacaggcggtgtagagatctgaccaggaacaccatactgttgaaattgttgaggggttggctgttgagccacttgggggggctgggcggcctgttcgacgatagaaccaagcagctggtattcgaccagattcatgaggagtagagcctggaagacggcgtaggcgagctgaggcgcttggcgcagcagctcagtggcacgtgctgggtcggcaaccgcaagagatttcatttgtgtcaagacatcgagcaattgatttggtgggagggatgcgagagtatgggagatggcgttggggcagtcgatctgaggcgggagttccacgcctgggggtaaaggaggcagtggcgctgagcctgtgatttgttgctgctgcgtggtatcttggttcatcattggttgcgactgctgcgagtaatctgggggtacggaatctttctcgttgttgtgaggccaatcaacacggatcttgcggcccatgacttcgtgatcgttgaggttgcgcaccgccgaggcagcggcgtcggcgtctgcaaaatctgcgaatccatatcctttgggtttgccggtctcaggattcatcatcaaccggaactttgtaacggtaccggccgtgctgaggatgtctttgacttgttcctcggtgaggtctagagaacgatcagtatcgcgcaggttagacatgcagctacggttacatactgtagggaatattccccaggaacacgctcttcccagtccgatcgggcgccatgattgcgataggaaatgagatgtcagtgagaaagcgaagaagtcgaggcaagcaagaaacgctgattctgcccgactttcccacaccgcccgaaacctcacctcatccgctcaagcatcataccaagtcaatcttcatctatctccaatcttttccgcgcacttactcacatcatgtctcaaaatcaacgggaggcttgggagcgcctgcagcttatgctgtcgaagcgtaaggctggcttcggtggcggcatcccatccggtggtggccgcggaggcatgggactcgtcggaactctcgttctggccggtattggtacctatgtcgcgtcaaatgctctgtttaacggtatgttaaagtcatctgctcaaggaatcaaatttctaactagtttttagtggacggtggtcaccgtgctatcaagtactcgcgcttcggtggtgtccagaaggaaatctacaacgaaggtatgaaaacccacgagccagacacggagctctctctcacatttggatgaccttaggaacgcacttccaaattccttggttcgagaccccaattatctacgatgttcgtgcgaaacctcgcagcatcccttctctcaccggtacaaaggacttgcagatggtgaacatcacctgccgtgtcctatctagaccccgtgtcgatgctctgccccagatatatcgaactcttggacaagacttcgatgagcgggttctgccttcaatcgtcaacgaagtgctgaagagcgttgttgctcagttcaacgccagccagttgatcacacagcgtgagaacgttgctcgtctggtgcgggacaacctggctcgccgagctgcccgtttcaacattgctctagatgatgtgtctttgacagtatgtaccttctcccctacctctagcccaaacagcttctaacacgccatctccacacagcacttgaccttctcccccgagttcacagccgcggttgaggccaagcaggtcgcacagcaagacgctcagcgtgctgcattcatggtcgacaaggcccgccaagaaaagcaggccttcattgtccgcgcacagggtgaggcccgctccgccgagcttattggtgatgccatcaagaagagcaagagttacatcgagctccgacagatcgagaatgctcgccaaattgctcagatcctgcacgacagcggtggcaagaacaagctctacctggacagccaaggattgggcctcaatgtcaacgcccacagcgaagagggcaaataatttcattccgcttgatacttaatggcgctgcgtggagggatgtgaattattgtacaaatagctggattaccaagcatctgaatgcggtctcttctctattttcttttcaagtctccttgaaacatagtaattctttgcaagtagtgtagacctctaggtaggatgcggggacaaaggcggcgagacgattttttagattcggaggggcaccacttcggtagttcaacacacttgactaggattgactagcaagtatcatctttaattcgtgagtatcagttggaaaaaccagctcaacgagttttctttttcttttggaattactcttcgcaaaaccccgctaacagcccttagagcatgcccgaagtcaccgacgataccccagtgcacctcaccgaggtcgacatcgaccttgacgtgcaagagattctcctcgccgcttcgcagcatgaccagtccaagctgcgccgcctcctccgcacccagtctgtgctgccagatgctgcaaacgttaaagacatcgagactggcttcacacctctgcacgccgcaatcgccgcctgcgagcccgatacagaggcagtcggcatcaatggctcagactccaatccgaatgatctggatgccgagaccgtgaaatcagcagtggagactgtcaagtttctcctgcaagagggcgctatctggaacgatctagacgcgaacaacgagacacccggctgtatcgcgggccgcattggcgcttccgagctgtacgagctgatcgtcgacgcaggtgtccgcgcagagttgttgatgaaccgcctcgacgcgtacgaggagctatccgatgatgacgaagaggaagaggaaggcgaccccgaggccgagacagcaccggaactcgtcgatgcatccgccgaacccacgacagaaaccacaaccacaaccacaaccacaaccaccccggccaaccccgaagtatccaactcgcaatatcttgaatcgcgcctgaacatccaaaacgaccggatcctggacgcagaccagaacggcgtgatgatgcgctgggaaagcgacattatgcgcaagtccgcgatagcactgctcccgacgcccggcctgaaagtcctgaacatcggtcacgggatgggcattgtggacggattcttccaggaacgagggccggctgtgcatcacattgtcgaagcgcatgaggaggtcgttgcagagatgaaacgacgcgggtgggatactaagcccggtgttgttatccaccagggtcgctggcaggatattcttcctgaccttgtggcggctggggagactttcgatgctatctactacgatacctttgcggagtcatatagtgatttccgggacttcttctctgagcaggtcattggattgctggagcaggagggtcagtggggattctttaatggtatgggtgctgatcgccaaatctcatatgatgtctaccagaaggtggcggagatggatctcttcgaagctggctttgatgtgcagtgggaggagattgccgtgcccaagttagacggtgaatgggagggtgtacgccgggcttactgggttgtggatgattatagattgcccctgtgcaaattcatggattaagggagatcttggatgatttcatggaaaggatatttaaaaaaaggacattggatgtctatgactgaatacgacgctttaaaatgctacataatggctgaaaggaacaatgtacaaatgttatcacagctgaatcaaatccacctccgagaaatctggaggactgcgactgaagatcgtccgacatttgccgtctagcgcctggtactcattgctgatccatatatgtttgctaaaccgttgtgttcggtacacttcgtcatcactcacacccagatcatcacgcggaatccagatgacaggccgcttggcgcgaagggcctcgtgctggaaggcacgttgcaccagctggtcacgctcatcgggcgtaagatcctctaattcgtcgtgaataccggcaaagagggcttggccgactgtgctgggggctggtgcctgggcctcggtgtcttgggccatcttttcccgcatatcacgtagtgttggtgtggaggttgctgagttctgaccgaaaaatttagatttccggtttgatgagctggaggcccatgatggacgtttgtctccaagcttgggtgctgacaagatatccgagttttgtcgcatctggtttgggaaattggtctccagaggtttcagctcgatgtcttcttgcatctcctttatctcctttccgtgccggcgctcttcttgttcacgcttggcgagggagccttcgatatcaccatcctcgtcatcgtcatcgtcaagagcgagaccgaggcgagcgtgctgagcacgacgaaactcttcatcacgtcgaacagcatcatcttccaaggtaacgggcagataccggatcagtggattgaacgcatcgttgagaagaatttggtaaccggccgtcaaaactagaacaacaatcatgcaaatagcctgtcccttgcaggcgacatcgtcatccgcgttccgaaccaagaagaacaagccgattaggcagacttccataacgtagattcccgtgaatagctgattaatagctcgaggaaaaagaaggccaccggtgtcaaatcgaaacttagtcacatagagtgtgttgtagcgatagacgaaccagaaaaggccgaaggtgaggatgttgaaaattagaatcagaggtgcgatcacacagtagatcaaaccttggagaatgttaatcaacggattgtatcaaaaaagacaagacgacttaccaatagaggctagggtggtatagacagggaagaatgtaccccattgcatctgattgaggtttgttgttcgtgcccacttcttccgggcagtagagtccaaaattggagctagaatgaaccagctcaccaggccaaagatttgtacaagggcgccagcgctcacagacatggcttgtagaatcatgtaagagaagaagtagttactagacttcgggatgttcactgctaggagttgtggccagctggttacatcagtgacattctcaatgatcgtcgagaaactggaagcgatggtgacaaccaagaacaattgcacaaagaggaatgcaaaataatagttctggacagtgagctcgatggacatgccggtgaagaggccttgcgtgcggctcaaaaagcgaaggatgagagggagcagcgccatcagaatagctaaacacagcgcaggaagaataccctggatggcagaaatgaaccagtctggaagcttgccaagccaggcaagccatggaaatgcaccctccagatatgccaattgtgatagtagtccggtgaaggcgacggggaacgcccatccaacgaccattgcgcaaactagtgtgatgatgccgaaggaacgcaggtaccgttcccaccacttgatcgacatattatcccaaatcacatcatcgggagatatttccacgactcggggtgccatctgcttggggagatggtgactgacagcttgacaggccatgtgggcagcgacttggtgattgaactggatgaaggccgagttcattaaagggaacccctcggggtgctgctgatcgacttcgatctccagattcagacgagcgagctcctttcgacaataatcgatggtgtcaaccttttcccctagaagccagatcgaaggcatccaactccagccaaatatgggtagacgcatggtatctcggtccttcggccggatgtattctttccacagcggctctccgtagtcttcattttcgaaattttcgttataggcgatagggtatctttccccttctatttcgtctccctcctttcgagcatgctcgtgtttttcgttctcggatttctcgaagtcacgataggtggcatgagttgcaggcgtttcgggtgcagtcagtggatattggtcagcctcgcgtacaccctgcgatcttgtattagatgacattcgtctccagaatggtggcttcggcggatcgctgcacatggtggcatcctggtctgtattctgtcctggatccggtcctatgggcttccctaagttcaaactcaagtgctgacttcgccggagccccacgggtttggcgggttttgtatcagattggctgccagaggcaagaagacctgggactggaggggtgtttgcacgaggcggaagggtgtctggtgttgcagaatgaccgggacctgagggggtatttgaacgaggcggaatgatgttatctgtagttgcaacgaagcccccagttcgagataacggtttcttgaagcctccaagcactgttttgcccagtttccctaccccttggccaaccgccccggcggcggcaagggcagggtcaaacattcgaggtccgtcctccgaccgtttctcttggggttttctgtggagcatttcttgtactgtatgggcctgatgaggattaccagagctgataccaggacccatagccatttgagatgcccgtttttcagccgtcttttgctcttttttctctgcacttgattgactctcgccggccttctttgcctccgccttggcctttttgagctgtgcctttttgcattttgcaatcaattctgtctcggcgctttcaagcttgagagcaagatggtttcgtgctttcactttctcgttcaagtcgtcgaagttgcggttgagccaaatgtttcgcacacctccagggaaaacatcgaaaagcctgtcaagggcatccatggtgagccaatcaggtggaatagaagtaacgagcacagtggtagcagaagcacggagtcgatgctggggagacgtcaagtaggcctgtcgcaggcgaatgtaattccgaagttcatcaaaaaacacagcacagacatagataatggcaatcacggccattaccaaatgagcccaataccgactcgtgtgctcaggggttacgttaccccatgccaactggtccagaccagtgacggaatatctagtgcctgaggtaccattttcgtatgtctggcccttgccaccagcacggtttattggaagtagaacaggtaatatcacgaggcccagaggaaggaagatcttcaaaagcatgcgcagatagcgcaggaagaagtatgcatcaagcccacatttctggatgaattccgagctggatgtacgaaagactgggacaatccaatggaagaggcctggcggagatggggttgtgcgttctctatctggtaccagataggttcgcggttgactggatatcaatttcggtcagtccaacgtccacgttctcctttccagtggggtttcaggggacttactatatacggcttagtttaccttttagtaacagaaagaggagaaattcaacgacgaaaacgacaatggccgtcgccagcgacgccaggaaggtcgagattgacacaccttcggcggttcggccgtggccgccagtgtgttccagcgcctcctccaagcccgaagtcatgacgatcagctcgggtattgccgagggaaatggggactaggacgctaataggggtatcgaagaagatgtcacggcaagaagcatcacgatatgtcgttgtatgcactgatggatgtcgaaagtaatcgcctgtagattgaggggttgaataagaaggagctctctgataagagaagaaaaatcacaaagagaaacccacttgcgcagacctagggcgccaacctgatcagctgtgggggacgagagccaataacgtcgaatttggtctttgagtaatatcttggtttatgaggtgagtggcgcgaggactgagctggcggtatgatatcaagaaattaagacgttgacgaacagggatgattggagggatcgtgggagcgccgatcgaggatacaatgacatcaggcgctaagtgaaacagcccaaagaagtcacggcagctttagatagattctagtggaaggagaacaaagattgctttgtgtaaccgagcgcctcggaatttgatctatatttataacaaggaatagctccttttttcccaactatgacaacgttgatactgaataacattgcgagacccctactacggtagtattgaagcttttagtggggagaaaaaaagggaaagagcggtgattggcccctgagtcgaaggtccactgatgtggcagtgcatttatgtaattcgcaaagtccaccagccacagggtcaggaactccacgtggctggcgggcaaannnnnnnnnnnnnnnnnnnnnnnnnnnnnnnnnnnnnnnnnnnnnnnnnnnnnnnnnnnnnnnnnnnnnnnnnnnnnnnnnnnnnnnnnnnnnnnnnnnnnnnnnnnnnnnnnnnnnnnnnnnnnnnnnnnnnnnnnnnnnnnnnnnnnnnnnnnnnnnnnnnnnnnnnnnnnnnnnnnnnnnnnnnnnnnnnnnnnnnnnnnnnnnnnnnnnnnnnnnnnnnnnnnnnnnnnnnnnnnnnnnnnnnnnnnnnnnnnnnnnnnnnnnnnnnnnnnnnnnnnnnnnnnnnnnnnnnnnnnnnnnnnnnnnnnnnnnnnnnnnnnnnnnnnnnnccccggccacagggtcaggaactccatgtggctggcgttcaaacacgtcggccgaaaggggaaaccacttaacgcgtcggtcgcgtccacggtggcagaaaccgcgttccgcccacagctttttgctctccctttcttcacttgtatcccatagaccaccaacccacctgatcatcgtctggtatcagcacaataattcatatccaccatgtcgtcaccaacacaaagacggagtggtcgctcctctaaaaattcaacttcatcgcctagttcttcgtcccgacaggagcctcctagcagtccgacttttcaagcaaccccccgtgcctcgagacgtccattggctgggggagccgcaccctcttcgtcccccatttttttccaatcatccccgacgaagggaaataacaatgccgagactccagatgaacgcatggccgatgccagctcaacggtagacgatggcgacagaaccccgcggggcaaccccggtgtgagaggtacgaatttggttgtatcagagcagcaccttttgttttcttttccaatattgatccctaaccgcctattagattcttctcctattcattatattccaagttctagcccaactcgaggcttcggtcgatctgatatccgatccgacatccgctccgatgcattgagcagcgccagcagcggattatttgtgtcaccgggaggccagggccgacggggaggtcctcgtcgcagcgatttgcattctgggggctttgggtctacttccggtcgccgtaaccgtgtgttcgttgacgccaatggaatgcccacaggtgatacaatgcctcgctctgatgccactttctcgaatatcaaccctggcacctctgaagctgaagccatcgccggaaattccactcgtgtgatctggggcaccaatatctcgatcatagattcaatgtcggcgttcaagaacttcctgtataatttcgccacaaaataccgcctctgggctgacggtgccaccgaggacgaaaccagactactgggagaattagcggaaagacatgagtgcatcaccatgtgtaacaacatgcgacgactcggtgtgaacacattcaatctcgatgctgctaatttgaagtcatacccattaacccgcaagttgtggcaccaactttccgcatatccgcaagaaatcatccctcttatggatcaagctttgaaggatgtcatggtcgatcttgccctcaaggaaatggacgttcttcggtcagagagccaacgcgctgctcagcctcgtgaccgacgtggtcagcccatcctcacttcggacaatgcgattccgactgtcgatgtgccggatttagttggtgaagtggaggcgatgaccttcaaggttctccccttcggtttggatcaaaccgtgaacatgcgtgatctcgacccagccgatatggacaaactgatcagcatcaagggcttggtcattcgtgctactcccatcatccccgatatgagagaagcgttcttccggtgcagcgcttgcagctatggtgtgcaggtcgacattgatcgtggcagaatcgccgagccaacggtctgccctcgagacggttgcaaagaaaagaactcaatgcagctccttcacaaccgttgcaccttcggtgacaagcaagtcatcaagctccaggaaaccccagacaacattcctgacggtcagactcctcactcggtgtctttgtgtgtctatgatgagctagttgatgtttgcaaggccggtgaccgtgtggaggtgaccggtattttccggtgcagtcccatgcgtgtcagtgctcgtcagcgctcgcagaagtcactcttcaagacgtacatcgatgttcttcatgtgcagaaatttgaccgtaagaagatgggcattgacatgtccacagtcgggcaagaaatgtctgagcaggcggcagaggcagatcaggcgcgcaaaatttcagccgaagaagaagagaagatcaagcggaccgcctctcgtcccgacatctacgacctattgtctcgttccctggctcccagcatctacgagatggacgatgtgaagaagggcatcttgctacagatgtttggaggcactaacaagaccttccacaagggaggtaatccacgctaccgtggtgacatcaacgttcttctgtgtggtgacccctcgacctccaagtctcaactactgcgctatgttcacaaaatcgctccgcgcggtgtctataccagtggtaagggttcgtcagctgttggtttaactgcctacgtgacccgcgacccggacactcgccagatggttcttgaatccggtgccttggttctgtccgatggtggtgtttgctgtattgatgagttcgacaagatgaacgattctacacgatctgtccttcacgaagtcatggaacagcagaccatctctatcgctaaggcgggtattattactacgctgaacgcccgaacatccatcctggcctctgccaaccccatcggcagtaggtacaattctaaactgtctgttccgcagaacattgatctgccacctactctgctctctcgtttcgacctggtatacctggtccttgaccgtgttgacgagacggaagatcgtcgcctggccaagcatttggtcggcatgtatctagaggataaccccgagaatgccagctcacaggagattctggtaagtgccatttccccggatgatcaattcgcgagatttctaaccgttctctctagcctatcgaattccttacagcctacattacatacgccaagaccaattgccaccctgtgatcacccccgctgccggtgctgcactcaccgaggcctacgtggctatgcgccagctaggtgatgacatccgcgcccaagagcgccgtatcactgccaccactcgacagctggagtcgatgatccgactttccgaggcgcacgcacgcatgcgtctgtcgcccgaagtcaccgtcggcgatgttgaagaatccgtgcgtctcatccgctccgccatcaagcaggccgccaccgattcccgaaccggtctcatcgacatgggccttctgaccgaaggcagcagcgcctctgaccgtcgtcttcgcgacgacctgaagaaggcggtgctgtcccgccttgatgaacgtggcggtgtgagtggtggtgcggtccgctggaccgacctgtatcgcgatgtgagcgagcagagcgacctcagactcgaccacaaccagttcggtgatgcgctgcgctcactggaggcggagggctccgtgaatattttcggtgaaggtgctcgtcgcagtatccgccgggcggccatgagcatgtcctaggtggctgcgatgataccatgatgtgatgatagattaggctgcatgtcgtccttgagggtgttctggtgttggtgtttcaatgggtaatgatataggattcggccccggaactgttgtatatggtagattgatcaataataatatttttccaatctcatgagttccccaaggttggctttgctagagaccaagacatgtggaaaggtgagaaatcacatgcatctggctagacccaacaagcacaaagcgggtgtggggctcgatcatcttgcagatggccctgtccatctgcaacgagcattgaaaaagaaattgaaaagcacgtttaatattggactgtgtaggttctagttctatagattgtgtgtgatataataacagggccttggaatggccctagacaatagaacaatcctgcgcagtgagagatcaagagaggtcaacagagagaaagacgaggaagacaccacgtgcgcccatgactggccggattgttcacgtcaccaaggggggtctgtattgcggatacagcgttaccataccataattaccagaagtacatctcgattgccacgatcgtgctctttataaccaccagtatagcaagttgatgcttattttaaactcactacggttaaataggatactccaatgccattcagctattcaccatgttgagctccgtttaaacgattgataccatattctatcgcctcgactattaccacacccacttggccacgatggggccgtcacccgctagtcatcggactagccgagttcgggggtccattataacctcttttgactttctgtcttcggataagctgaactctccgaatttggcctctccctgcctccctcacaccttttttctttcttctttctccttctctttcttcttcccgtcatgagcttgggataaacctagactccctcacatttctccttgcccaccatgaggtatcgaattccctgtctcgctgtcttccagccaattccactccccgcgcatttatactgactcaattgtctcataggttcggcgaatacctccgttcttccatgataaaggaattctatccttactacattgcctatgacgatctcaagaaagctctgaagaccgatttcgtcgacgagccaacgtccgataacaccaagcccgcccgcaaagaatggaccgaggacgatgagacaaactttgtttccttgctcgagagtgaactagagaaggttttcttgttccagaagcgcaagagcgaggagattgttgcccgcattcaagaaagcgagctcgcggtgaacgatgtcgtctcccgtttggacagctcggccgattcccgtcgccagagtattcgagcttctcgccccgcgcccaccgatgcggatttcttgatgcttgagcaggtactcagtgatatcattgcggatgttcatgacttggccaaatttactcaattgaactacacgggtttccagaagatcatcaagaagcatgacgtaggttttccttccaggtcgcccctatcaattcgctaacaattgcacagaaagaaacacaatggtacctcaagccagtttttgcgacacgtctcaaggccaagcctttcttcaaggacaactacgacgccttcgtgattaaactatccaagctgtatgacctcgtccggaccaagggtaacccggtcaaaggtgattcgtctgctggtggtactcaacagaactttgtgcgtcagaccaccaagtattgggtgcaccgggataatattacggagttgaagctggtgatcttgaagcacctgccggtgttagtcttcaatgccagcaaggagttcgaggagaaggacacggccatctcctctatctactttgacaacacggacacttgggaactgtaccagggtcgtctgaagaaaacagaaggcgctgaggcaattcgactgcgttggtacggtgggatggaaagtgaccagattttcgtggagcgaaaaacccatcgcgaggactggacgggagaaaaatccgtcaaggcgcgcttcgtactcaaggagaagtacgtcaatgcctatctcgacggccggatgacggttgagcggatcttcgacaagatgcgcagggagggtaagaagagcgcgtcggagattgatgatttggagcaactagctcgcgagattcagtaccgcgtcattacccgccgcttggtgcctgtcacccgtacattttatcaccgtactgcattccagctgccaggtgatgcccgtgttcggatctctctcgacacggaactgaccatgatccgagaggataatatggacggccgtcaacggtctgggaagaactggcgccgtatggatatcggagtcgacttcccattctcccagctgcctcctgaggatatcgaccggttcccctatgccgtactagaggtgaaactgcaaacccaggcaggccaggaacctccccagtggattcgggatttgactgctagtcacttggttgaggcagtcccgaaattcagcaagttcatccacggaacagcgaccatgttccctactcgtatccacctacttccattctggttcccacaaatggatgtagatatccgcaagcctgcgactcgtcaattcggtatccacagaccgctggcgagtacctcaatatctgccaatgatgaagattcggatgatgacgaaacgccgagtgcgcaagagacgcccccgaacgaacacgccaccgagcatcaaaacggattgtttgagaccaatggcaacgaactagatatcgaagaacgtatcgccgctcagcccttgcccggtgacgaagactacccattgtacgactcggatgacgaatctgtatactccgatgaactcgaagaagctcgtcgtgtaggaggggcgtactacgcgcagaaattggccaaacattatctctctcgggctggtcacgctgtcgcacagggtcttatggcgttaatcccccgcccccgtccaacatccctgcctccccccgaacagcgtggcatcgctgtcttgagtaaccaccgacgcaccctacagcgattccaggctcccccgggtaaacgtaagtcggctcaatgcatcttgtgcatcaattccccagactaacacacttcgcaaaaaattaggcatcttcgttcccatccgcgtggaaccaaaggtctacttcgctgccgagcgaaccttcctctcctggttagaattttccatcatcctcggtggtatcgccgcaaccctcctgaacttcggcaccgatttcgcgaccctcatctcctcctgggcgttcaccatcctcgctgcgggtgccctcatctacagtcttttcctgtacatctggcgcgtcgacaagatccgcaagcgccgtgacgtcaaacgcgtctactatgagcgctggggtccgacagtcgtcagcatcggactggtcgtaatcattttagttaactttgcgctgcgcgtgcgggaaggcgggtttatggctgcgccgggatcggaaggcgagcctcagcacggcgggcatggggaactgtagaactcttggtttgtttggaaaagaagaacttaatcgttctctttgttttattgggttgaccaccttctttactgctcattggctaggcgcctcttacgtttgtatctactggtggcttcgggctggggcgttgggagattgtaaatcatgtacaaatcgcatacataccattgcaaatagtgtgagaatggcactcgattaccgatttctttgctttcgttttgtagatgttgtaaagtacaaattccagggcctgtatctcataagcgagtgacaacccagaacgcgtccatgaatcagcaatattactaaggataggatatatcatcttcacaataagctgtaggctgagaaggtgagttcagaaagacatcttcgaacaggttcccgaatggaaacgagaaaggaaacgccatgcccatgccgtcttgcgcaacttgatcaaataagcctgcagtggggttgatactaccagggttgctttcgttatcaagttgactcgcaccatttcccatcgaggatcctgttgctgaatgctctgctacccttgcgccatcttgtgtctgcccacctgcagagtgtcgcctaagcagggattcgtaaattggatagaaggctgcaagtaccgggaaccgatcttgcaacttgtcaagtatcagcatgcataactgggcgcgatggtgtgaaatccatcggacaccagtatcccctctgtgtatgttgacaatatagattgagagcacagacagcacgggtgcaactctgcaaaggctttagcaaaaccgccccggatcgattgggggtactttattatggaggcgacgtacatgctagctgcggctgcatagagaagatcacttgccatgagtatttctagcatgttgtagatctccgcacatatctcgaatgtcggagtgcctggtccggtattgagagaaaaccttgggttgctccgatgcaaaagtagccggtattccctatagattcagaatcagaatggagatattttgaagagccatttgaaagtcaacttactggtataatatatgagtcaatatagcccacttgctgctacttggcgacaacgacttgaattccggggaaagggatgaagagcacaacgagatttgctctaaacagatatcttgtgaatggccactatcttcgtcaaatttgatagtgaagaagcgatccactgtaatatatattagcaaggaaatacattcaggaatatgatatgatgatggatgttgaacctgtccgagctagttgcacagcatttatcacaaaggtatttgcctcatcggggtatcccacttgagacccactggcttggtcaaaatctgcttccgacagaggggggacattgcaaagtcttccttgcacgtgtgggggacgatcgagaagcatagacagatttatgtccatggcctagtttagaatgtcagaccgtgatagagctggggctttgttgagcaataaccgacatataccatccaccataatcttcgccataattttcgttctttctcttcgagacggttatatgactttctggaatactgatcagccgcccttggctcacattggaggggtaagtagactcacattcgatgcagtcctaaagcctgcgccattcccacagagataccaacccagtaccaagggtctttgtgttctagaagaccattccaccaatagcccataagaaatgttgattgaatcgtcgctatcgcatcggtttcatatccagcatcgtacagagatttggctctctggtaaaaagttaggcttgcagcgtatcgggacacaaatccggcaccagcaatgacggaatccgaacaatttatagtggcagcgaggtagatagcattcaagagcaagtgtgaagatttgccttcctcgagagtgacaagaaatcttgacttatcaagaataggtgcagcaagtgagaaatgaaagtaacaatcgagaagggcctggctcgtctcttgtgacggaagatcaaatgccccttggttcttgattcgctcaatagtagatatgtgaagcttttcgatttcttgcgtcgtcggcctgcccaaccgggccagcattgccccgtggaggtggtcctgaagtgggcgagcatccgtcgtacctacgaaaggatttccaaactgttggatcaaataattgagattggaagaatctccaacatatggagtttttccacttgggccttgggctgggaaacatggctcttgccgtggcttatctccatcatcttgagcatgagtggtcagaggagggttggaacttgtcagtccttcatacggcacattgcgggaggcctctgaaagatcactgcctaagtctgcttgagtggtcaggggaagaagctttcgtctcctgaatctgaattagtcctagtatgatggcttgggtcttgaatcctaccgtccacgacgagatataatcaactcacattggcgccgggcattccgacagttggaacacgcgacaccttcactgcggtcacatttgacccgccggtcatgacacagacgacaagcgattttgactggactgctgcgcggcatttgataattgtcaaaggcaattgtccgactctaaagttcggcgtcttgacttcggcgaagttggtgagcgcagacccacaaagtcgccgaatttgggcttatctgattggatgtctattgatatctaccctctcattgggtgctcaacaccaacagtttagaacgaagtataaaagttctccaaggaggggtttttactcaaaccagcaaattattcaagttgctgctgaagatgctttcgaatatatcctctcgaagcatgctccgtcgctccaatccgaaacaatggtcacagtgttgcttgcccaccgccgcaacgacacgatacctacgcacatcttcagaacctggtagctctacatctgcacccgtaccattcaaaagccagaaagatggagcgtccgggtatcttttgtaagtccgatactgaattgccaacttgcaacccgactgatttatagttctaacattttctacctagggcaaaggcagacgaattggttaactggggaagacaaggttccctttggcctttatcatttgggctggcctgctgtggaattgaaatgatgcatacctcgatgccacgttacgatcaggaccggctgggcattattttccgtgcctcgccacggcaggccgatgtcatgattgtggccggtacggtggtcaacaagatggctccggccgtgagacaactatatgatcagatgcccgagcctcggtgggtgattagcatgggcagttgcgccaacggcgggggatattaccactatagctacaatgttgtacgtggtgtggaccgcatcgtgcctgtggatatttatgtgcctggatgtccaccgactgctgaagcccttctgcagggtatttttcttctccagaagaagatgcggaggacgcaggtgacgaggatgtggtacaggcgctaagcgagggttgaatgagagtatatatatcctactactcctgacgccacggaagatatgcaacgcttcaaatgccaaaaaccgtgatattcattcttccacctcgaactgcatctctcgctctataatatagatccgtcagtatacacctagaacaaattctctacaaataacaacataccccagatcttggtcgcatgtgcaatgatcgtctcagccttgaccagcaatttcgcagcatacctctccgtctctgtcgggtagagttgacttttctgcgctttgcgaggattggcctaaacacatcaaggacacgtcagtagatgatcacacatatgtatagcccagcaatcctcttcaaggtatcccaaaaaagaccaaaaacccaccatcataagaacaggaaccaaatccttcggctcagcctccgccaaagctctcaaattcttaaatccattatccctgagcaaacgcgccgtccaactcttcacaaaagtaacctgggccatctcaagcagatccgcgcgcgcgccagcctcaagcctatcgcgcatatgatccaagacggctgccatcatgccccagttcatgcgctgacagaatttgaccatgccggcggcgaagccgtggcactgctgtgccaaggtttgaactgcaccgcggggggtgttgtagcgttgggctatcgttgatatggggacttcgttgctgagatcgcggagttgaagggctgtgtaggcgcggcagtagatgcgggcttgttttatctggactgcggtgttttctttcagggaggcgcctgattgggccctgggataagaatgttagtttggggttggtctggtctggtttgttttgagggtgggtgtagaattgtgtgcgatatgtgtaggagcaatggagtagcagagggaaggggaggcgtacattgtgttgacgaaacctggttggactccgactaattgtagagcccggagaccgctctcatctagcctgtctagctgatcgcggaagatttgccaatcaatgggggtgttcacggctgcttggagcggagtgaacatgtagaagatgtgcatgtcaccgtccatgacaaaggcctgtaatgctcgtttcagctcttcgtgaacgaacaggccgtcttcgggtgaaaatgccgaagccacgattgcttgtcctaatggtgtggcttcgtaggattcgtcgtttcgcaaaataagaaggtcttcgtcgactagttcctgaagagcggatttcatgatgctgtatgcgatcttcttgtccaacgtttggtagagaagcgtgcaccgaacatattccttgatcgcctcgcagccggacaccaaccccgttgccacggcttcgagtaaggcccttttggttgtgagcgaatgattcaggagcaataaatagagtagaacaagatacataccgcttgaggcctcttttctcaggtgccaggcagctctcaatagctggcatatcagcgtccaacagatcgcagacagcctgcatatcggctttcacgcagatgagataggtctcgccagcgttatccttgcctttgcggccagcacgaccgcacatttgacgactaattttgtcagcttatactccttactccaagaagaaggtacctacaacatagccggacctactaattgacgccccatgcgcgcaccattgatgataactcgtctcgccgggaggtttacaccagcggcaagactgcacgtggccacgaggactttgagcacaccctggtcataggcctgtgcaattagctcccgctcttcggtggtcatcccagcatctaagtggttattagtaagcgtggaaactggccccatggatggatatgtactaactgtgaaaccctgtccctctgattattgttgtctccaaagccgggtccagtccacaagcgaggctccgcaattctgcaagaaggtcgagtcgtttattcagctcttccggctccgccggcggcatcgcttcaccgatagtcgcagcgtgaatttggcatgcgttacggctgccacaaaagaccaatgacccaaacccagctgctgcagtttcgacagctagcgctaccatggcattagtggcagggttgctgagctgcttagaggtagaaggttcaattattcggtgtggaggaatggtatcgtgtagggacgcagctgcagtcagcttagatgccgtatggaacaattgccgcgaggttgcagctgggtagattccattctcgtataccaagtattcctcaataggaattggtttgtatgtggagatgtagaacttggcgttcatccattgtgccagcacttcggtgttctgtacacctgttagagcagcccaccgagggcttgaaccatagacttacagagagtgtagcactcatcccaacaatctgggtgtcctgctgtaataacagcagcttcgtgaccatcaattccaagagatagccccggtgttcgtcatcgagcatgtgtaactcgtcaagaaccacgactcccaggtctccaacgctacactcttcgatggtgttgtttatcaacgaattggcctaaggaaataaatatcagagctctgcaaacaacactgaatcttaatcgtgcacaccttctctatcgtacaaacggcaatatcagtatccgcccaagaggctgtcgtccgacttccgccaaagaagcccgtcactctgatattcttgtgcaatttgttccatcgcctgcaaggaaatttggagtcattttcatcatcatccgggatatttctttccacgtcttgcacaatgcgacgcatccacttgagcttctcctgaaccaaagcaacataaggcaaaaccaacagcgctttgcgccctgggttttcgataatgcgtttcaaaagcagaacatccgcaacaagagacttgccaccgcccgttggcgccgtgtaaaccaaatgacgttcaccggagagtaagcccctggccagcagacaagatgcctgccatgggtagatattcctaacaccgagagcggcaaaattcgccgtgagagcgggcggcagaccatactttgggttagacagagagagcagggggttctgactagaaggtggggcggtcggtgccacagcttttggaggatcatccgaggttggctccgcgcccgcgcccgcgccaagatgaatcttgctggcagtaaagcgatggacgggggcgattagcagatctcgggcagactgtagcggagctgattccaatatggtgtctgtattgccattttgacgagggaaagtagcttgttttacgactggaccgggcgggatgtcgagaacctgctctgtgggctctgtcgggggtcgtttctgtcctgccacgggcgctacatgatacgcttgtcgacgggcgagatcaatggatgtctggaatccgcgagactggacttgatgacccgttgtcgacatgcctgaaacacagatcgatccattcgtctggggaggggataaatccagttgtgtttaatcaaaattggccatctctctgactttgaaaggtttatgttttatttgatgttgtttgccatgtttttcacggtttgttgtttttccaaggttatctagtcggcttactattcgttgttgctgcctgaggcatggattatatcagcggttatgtcagagatcacgttatgtcatccactcagatccccccggggctgggccagtcaggtctagttaacttgatgttcttagacatcgatgatcgccgcgtttccaataatgtgcgcattacgggattattactcgtattgcatgcttccatgctcccatgctcccatgctctgcatgattgaactgtagttccaatatggccaccatggagtcccttgctcggggactacaccaaccttgtacgagatcgactgtggaggcttatgtggatgccgtcttcccagccctggagcccttgagccctgatgattgcccacaagtacgttgtagaaacgcacaatgaccaaaaacggatattcgtagccccatacgtgtcaatggatgcctgggaacgattggcgcaattatcgtgtgtcgtcggagccgagagggtcggctgacgatctggggccaacggtgatggatttgcctcaacgcggctagaagacatcgtggcatcctcggaacctgcaacatacaacatccacatacatatggaattgcatgcatgttgacttagccttgccagggggaaaaagaggaaagttccaaaattccagtgcccatcccaagatcaagtatattgtacagaatctgagacccgatcggggtggaggcgtcataacgactgtatcatgagtcgcgcgtaccacccacctatgcattaggattagcaggattagccaaattagcaagattgtgaagtttcagtattgtatgacgataacatggaattcactgaccatgcatggtgggaatgtgatatagatctcaatctgtatcctttatttctctgtttcccctggacaaagtcacaagaaacgtctcatggcaagcttgataccacgagcgaaccccctttcaagccaccgtacagatgatggctgtaatggtcgggatgggttggatctgttgttcggaggtctgatcgccgcatacaacatatatctcccagatacatctgacacctgatctcactccaaccctaacacctacacagctactccgtataaacagcacacaacacacatgttatattggcttaaattgtcccggtcccatgggtggatttcccaacggagtaggccggcacgttatacccaaagagttcagaccttcacggtcctcggctagttctcggcggcatcgatcgtcattggagagaagtttaaattacctatattatgattaccctgatactctgatacttagtcctgtgtctgtgtattcccaattcatcgtctatccgacaatcgcgcctcaggacccaccctatcctaatgtacacgaatttatagatgattcccccttttgcctctcccgagatgcgtagccaatcccggtgtgtttggtcgcacaagatcaggcgaacggggaaaaatcaccaaaatagccaacatggcaaataagaaaggtactggccatgtattcctggtaattttccaatatcagtccccagcgactctgtttctaggtagcagctcccactagacctccatataaaactattcacatcccctttgacgtgctgagtagacaccgttccgcataccagcattcctgtctagtgtacgtcggaccactgatcgaaatatccagtagatcgagcaagggaggtccaaatgaggttctggttccccagggcctgtccttggggatccgtcatattaacatattgggactaggggccaggttcgggatcctcgacactttttgcttttttccgttttccttctcttcttctcccccttccccattccccgttgggctatatcgtcttttttttgccgctaaatcacttttgacccgcttctcccgacccatccctccctccactctatctactcttctctctctactcttctctctcctcctctcgcctttcttctattctggtcttctattcttctattctcccctattcatctcattcgagttggccttttcgattcattttcggtaagctccctattcttccttgccattcgtctattagcttgaagaagtcccctatcaatgttgttcctttcactcttgatatcggaaacacccttcacccctgcagagaaagaagatctgacacggtccactctttgtctttcccacttcttttcgcttttcccctttgcaactcccttgtgaagttcttcgtctggaccggtgaatcccatatctgcccacttacccgtattttgagattttcgcccttcccactttcagcttgcattcttccattgagcgtgtcctcttcccgcgttttctaaagttccaaggcgacgggttcccactaatcacccgccacagcttcctctgggcttgatcttttcacttcttacatcttcttccccccattccatcttcatttgcccgtggatgactaaggacctcactcaatgaccactcccaactctccggaggcagtggccgattcggccaacggctccgccaccgcgtatggcacgcgatcgagaggtcgtaatgcccctcggccaaattacgccgaggaccgtgacctggatgcggacatcgatctctctgctccaaactccaagtccgccaaaagaaatagcggcgtggcactcaaccacattgtcaacggcgccaatcacgaggagaagacctcgtcggcgcaaccacgaaagagcctgaccaatggtcagagcgcaaatggatcggcaaaagatgccattcctggcacttcttcattttccgccagaccggatgatgtgaatggatctaatttgagaaaacgcaaacaacccgccagcacgccacattccacccccaactcgggtggtgccgtgaagaagatcttcaccacccctccaggcgattcggaagggggttatttcaccaacatgatgagtttcgaaaactctgggccctatttgcaggatggccaattaatagccgatgatggcaccacttttgccctcaatggttagcccctcacttccttcaaaagtgattgttccaagactaataatttttatagaccatgtttatttgatttgcgaacctccgggggagccatattatctagcgcgcatcatggaatttctgccatccaaaaccaagccgggtggcttcattgaggcaatgagagtcaactggtattaccgcccacgggatatccagcgccattctcccgacactcgatttctctttgcttcaatgcactctgacacctgtcctctttcttcactacggggcaagtgtgatattcgacacgtgtcggagattgaagaccttagctgttacaagaagacgaggaactgtttctggtacgacaaaatgttcgaccgatatatccatcgtctttacgatgtcattccgactaaagatatcattaatgtcccgggaaacgtcaagaaagtgctcgacgaacgctggaaattcattctggtcgagatcggaaaggggaaagaattgacgggtgccgtcaagacttgcaagcgatgccatttatacgccgcaacctctgaatcagttgactgtgcagtttgcaattcaacatatcacatgcattgtgtccgacccgccttgacaaagaaacccgctcgaggctttgcttgggcttgtgccgcttgcagtcgcgcccaggagcgcaaactcgaggcacgcaacacaccattaactggcggcatccgaacagatggcgaagatgtgatcatggaagaagaggaggaagaggatcccaataatgtggcgaatggcatagccaacggtacctccgccagtacccccgcagccgaggaagattccatgcctcaacccgcaactgcggaacagatcgcacaagccaaaatgtggccttaccgatacctgggtattcactgccgcgtggaggatgctctggattacgatgatcgaatttacccccgagccagctcccgtctaggaactcggcaccaggcagtggtccccgcttggccaggccgtccagttgagtacgtgaaaccccttgagacgaaaaagaaatcaaaggttcccggcaaaaaggatggaaagctctctaaggatgcacaggcagcaatggaagctgcgaagcacgagagggcaaaccgaccgaagtgggttcaagatgagccagtgggctatgtgcatcgtggtcaggatgagccgatcataatcaatggaaaacagacgcgcacagccgagcttcaattcaaaatgcccagttctgatcagatcaccgcccgcggcgaagatgacgcacctggctcccatttaagcgatgcagatcgagaaaagttcgtcgacgactacatgcgccaagccaaggaactagcccctggtattggggttgagaaatacagcacaaatttcctcgacagagcccttgcacttctctactctgagaacttcgatgtccaggctgcccttgctaagctgaagaaaaccaacaagtacaaggatcttaaggagccccacatacgaccggaggaactcaagctattcgaacaaggtgtcgccaagtatggatccgaatggcgcaatatcatgaagcacgtcaagactgtccatatctatcagatcgtccgtttctactacatgtggaagaaaaccgccagcggtcggaagatttggggcagttatgaaggcagacgtggcaagaaggaggtacgccgtcatagcgtagtttcatctaaactccttgacgacgtggccgatgatcaggatgattccgcctttgactccgagaaagccattgtccagaagcgtggattccattgcaagttctgctctattcgccattcgcgacagtggcgccgtgcgcccctagttccccccggcaccgtggttccgtccgagccctcaaacaagaaagacaagggccctatgctcaccgttgcgctctgtcttcgctgcgccctcctatggcggaagtacgggattcaatatgaggatgttgacgaggttgcaaagaggattgcaggcagcggtaacaagtcatggcgacgccgaatcgacgaagaaatgcttgcgcaactgattgtagctaccgaaactccgtttgtcatcacccctgctacggcaactacggctactgcgatgggcattccgcttgatacaaaccctcgactcttgatggaaggaaagccggaaggaaaggtggaaggaaaggtggaaccgacgaaaaagaaggccaaggaaacgcccgctccttcaactgcgacatccgttgaacctatgccaaagaggaagacgatcccggagaaagtggtggaagctccaccgattgttcccgacccgccaaaggccaagaccctcccttgttcaatctgcaaccaaatagaaccttcaggtgaagagcacctttcatgtcgggattgccgtcttacggtccatcgcaattgctatggtgtgcgggattcgcgccccagcagcaagtggctgtgtgatatgtgctccaacgaccgcactccctcgatttctacagactacacatgtgttctttgcccagtgtcatggaccgaacacgacctcatggagacgcctaagaacaactcccggaagaagactgagcgtgacaaggaaaaggagcggatggagaaggagatggttgcggaggcgattaagctttatcgccagcgtcaggaggccgttgggaagcctatcggtccccgggaacccctgaagcgtactgcaggcaacaactgggcccacgtgctttgcaccttgtggaccccggagttgaagtatggcgatgcagaggagcttgagcctgcggaaggattcggatctattcccaaggagcggtggcgcgagacgtgtaaggtttgcaagtcaaataagggtgcatgtgtaccatgtagctttgctggctgcaatgctcacttccacgtgggctgtgctttccaagcacgctaccggttcggcttcgatatcacacccgtcaagagctcacgccgcgacagcatgcgagctattcgtctcggcgaagatattggagcagcgacacctgctgtttactgtccaaatcaccatgtgtccactgttctgcacgaaatcggtgagcagacaaaccagcatcatctaaacgctctccaattgttcgcccagacctacaagcaggccgacctcaccctcactggaaccgttcgcaaagcggcgtacatgcatcaatccgtcggagctccgccacacccttccaccaatgtcaaccgccgggcttcaacgagtactacgccggcttccagggatacccacaaagttcagccggtggaggatgtggctggagatcccatggatattgataccgacaaccatgttgcatcgcgaccggttgctcctggcgtggagaccaaccgcaaatgcgttcgttgtgccaccggctttagtcctaggtggtgggctattgggcgacgacctcctatggccaatggctctggacaccctcatcatccgccccaaggtcccttcccccaacaaaatggagatccttgcgaaatggcatacgaatgtcataaatgccatttgaagaatccggcgcctcctccccctccgcctgtaccagagcccacgcccgaccaacggccttcgccttactctgctcaacgccccatgatacccacctcacgaatgcctggccatccaggtcatccaggtcatccaggccatacatttttgccacacccacatccacacccgcacccgcatcccccccctaacggtgtgcttgggcggccgatgcctcctgctcacccatccaacggacttcccggaccaggatacactggaccatacgagcagcgtcacacgcccgatatcggtattcgcaacggcatgtcgccgtctccttatcccccggcacagccacctccccatcacatgaataactacccgccaccccatcctgcagggccattacctcaacactataccagtgctgggccttcgggacctccgccaccatattccacccaccagagcccgtatggccctgtgccggctcgctcgccgcatctttcgcagccaccgccgcgatcatatgcagcgtccgcatcccctccaatcgtgcaagcgacgacgatcaaccgatcaccccagacctcgctgagcgctctcaacggcggtccccctcctcgcatgtactccgttgagcgtgtggtaggagccccctctcactcaccaccggtgacgcaggcacgcattgacccgcgggggcccaccgccactcctcccactcgaccggaagatacaccaccttccctgatgggcgggccaccaagcagtcggcactctggggtcaacggtacagcgcccgggaccggagcgagcgcaagcccatcgctgaagaaccttctctcataacgatatccccctacacgagtgctcctaatcgagttgtatgatagtgacctttcctatttgcttttaccgctactgcatatgcatgccacggcatcacatgaacaaaagtgtgtccgcggttggattctcctttctgtgttttctctttgtttttctttcctttccagctacggagaccccgagcctttctagccggtagatccacctatcggccaccatctttcaccctttatcgtttcttcttttcttatgtgcttgttgtttttcggcgtcttgaattacggcacctgggaaaagtccgtggagtctgttaaggagcggttggggggcttgatgtcgtcgaaaatcacggattgcatggagtaggattggccactttatgattgatatcaccattacccatttttccagctagatgaattgttcaatattgctatgatctacattttctgattcttcaacaatcgtacattatccacttaggtgtccggcatattataaaccaacctcggaagctggcgatgctgacaaatgccgatcaaatgcggtcagttcgtcatagctgttccaaggttggcttcaggggatataaaatagatcttctgcagatatttgcatgaaaaacacccattgaacacttttaagcatcacccaaaatgagcgacaccatgcgagccatcggtaagtgagcgcggggttgaagaacatttccccacctgatatcatctacacttttggaatggaggatcatacatcaacccatctgcttcacttcattactattcactctctttcctctatacccacacctcgaatactttaatactctatacaatgtcaaccccaagactaacaaaccctaggcatcaagggcggcaaaggccccgcaacaagcctctttgtcgaccagatcgccaagcccaccgccgcagaaggcgaagtcatcatcaagatccgggccttcggactgaaccgcatggacctgcttcagcgcgagggcctataccccgtcccaccccaagcacccccaaccatgggcgtggagttttccggcgtgatcgagagcttcgggccggacggacacgaagacttcaaaatcggagatgaagtattcgggcttgcatacggcggcgcctacgccgagtacatctccgtctccgctcacatgctagtgcacaaacccaaagagctatcatgggaagaagcagcaggagtcccagaggtgcgtacacccaattcaatcatctaaaagaaaaacccgctaaccaccacccgtagacctggatgacagcctcgcaagctctcttcctaatcggcgaattccaagcaggccaaagcgtcctctggcacgcaggcgcatcttccgtgtcaatctccggtatccagctcgcgaaagacgccggtgcaaaagccatctacgcaacggcgggctcgcaagagaaaatcgacttcctagaaaaagaactcggtgtaacgaaagccttcaactacaaaacccaagattgggcggcggaaatccagtccgcgacatctggcgcgggcgtcaatctcaccatcgacttcatcggcgcgacgtatttccagggtaatttggacgtggcggcgcgcgacagtcgtattgtcttgctgggccttatgggcggtggcaagttgcctgacggggtgaatattgcgccgttgctgtataagcgtgtgcggattgagggcagcacgctgcgcagtcgggatctcgagtaccagcgcaaattgcgggatacgcttgttgagcacgcgttgccgcggttctgtgatgggacgtttaaagtatttgtggagaaggtgtttccatttgagggcattgaggaggcgcataagttacttgagagtaacactactaaggggaagattatttgtgtttttgagtagattgcataacatcgaatatagagaatgtggaaatattatgtacggagtacaatatgtagataagctaatactaggcatagccaagagatcgacaaagtagaccccacccttgccatttacaaaaaaaaaagaaaagaacacatacggagtatacgcagtagtacatagctgtataatttgccaagtattgtaacataaactacatacatatatatgtaactagaacatatagcagttctaaaagtacctgggcatgcatgcagctatccctcgtgccgttgattggccgggttccccttccaatcacatggaagctatcagcaactgaaccgtggatgacatggagattagctaaggccacatagccacctgggcatattagcctaggactgtccattttatgtatgacgtgtatatatttgcatacattcaatattcttcttaatatagataatcaatgccctagcctgtgtcaagttaaaggtgaatgcatgcaattgtacctcctgcaggtgatccatttctgaaagtggagaacaatcgatgagatcacctcggattatctaatattccgtccgatttggccccgaatgggcccatcttatccacttttttcttttctttttctttttcttctgcttttttctttttttttcgattctgcagggtatgtgtattaatatctagtatgtacaatagggtattccaatgtagtatacaatacttgatgtattgtagctaaatcaatgaatacaaaattactacaactacctacatatatgtaaagtaatatatgcagtgagataacagaagttcgagataactatgtcgactgcatacatagctacccgaccgccctgtattgtgttacagaatctgtgcttactaacccacagaccttctagaaagaaggaaaaaagaagagaggcgtcattgggcccactggttacgatcggaggctctgcccaagaagcaatggtatagaggaagagacgaagacatagttgagagatgagtattctgctgataatcgagtaattagcgacaagtcaacatccctcaagatactcaccaaaattcaaatatacctgctagtgtacccaagaccaagattacttgaggatcatcccgtcccgccccaaggccttctggaaggaggaaagaagccccttccccgtgttcgcccctccacttgtcctcagctttgggtgtttttgctctttttaccaacttctttatttcacttcccttttcatcttttctttgtttatctcaccgctacacgctacacgcatacaccacaccatgtcgaattgacgtcctttcccgcctctcccttttgtgttctttcaccaattgaacccccttcgtcctcgacaaactcacgtgtcgctctcatcccatcgctcgtccgaatccgactccggggtagaaaaagtgggttgcgcgctcgatctgtctagtgcgacaagtctaggacaagtctaggctctgggggttgtctcggatcctccagtccataacgcgactcggactgcctcgctgcaggagacaactccattgttcgattcggtgacctgagagcgtgcttgccgactcctgccattccttccccgactttctttgtgccgattcaatcggatctttcccgacctcccatcaccctcattccagccgctcgtttttttcttttcccttttcacctctcataaccgtgctcgtcactcgtaccttctaccattcccctggtcttcgtcatcagagccatatgcgagccaggaccgctccgaccgactcctttcctttttcttcactccgattgagttcttgtcggtcttctgattccagcaagccctgatcgggggtcgttctcaaccttctaacatcatggtggaccgcgtggattgcgcgggcctgtacattgacgaccgagtgcggtcggagagatgggtgcgcaggaattccatcgatacttcaaccatctcgtgcgcgggttccttcgcgacacccgaagaaccggaggccctgcaagccgatgtggagcagctgttgttggtgtgcaaacaaggtaggttctacagacttgcattgcgttcgatgatttgctaattactcccgggttttgcagtctatctctgccacaacggctcctcctttgcgacgaaactggccgagctcagcgaccgggcgggtagcgaatgcaacccgattttcgcattcttcgaggttgacttcagcggcgaagagtcgaacttggctcgtcgaaaagccagtcgcgcttcatgggccgacaatgctcctccttcgccgggctccatccaccgcactttcacgttttcaacgcagtccgacgaagcacgggggctgtcccttctgtccggtgtctcaaacgatattcaagcccaagaagggccaaatttggtcatccccattgctattttgcgccttcctactcccgatgcccctaaccatgcgtctgtcggccctaccagtcaaccggattctcaaggacctcttacggtggagcacaagcaaattgcccgctgtcttgatgccggtgctatggatgtcttgaccaccccgctagatcggtcgcggatccaagggcttgtggttcatgcctaccgcacccgtaaagcggctcagagagagatgtcccggttcctcgcacggagaaagcaacgaaagctttcttgggtcggcgtgcatgatgagcagccatattcttatctacgagaagccatggtttcaaagctcatgaaagggatttgcaacccagaagaagtcatacatgatgaattccaagagctggatctcaacgttgatcccgcgcgtatcccttttgtcagaaaagaggtaggcagttggaatttctgcgctcacgagttcactgaggacgaactggtctttggcgcttgtgagatgatacaacatgctttcactatgccaggactggacccctggcgattgacccccgatgaactgcaaactttccttctcagctgccgcgccgcctataactccttcgtgctttaccacaatttccgccatgcgattgatgtactgcaatccgtcttttgcttcctgctccgcattggtgcattgcctccatatcaatcaattggtcaatctcctgtccccgaaactcccatcacctcccttctcacgccattcgacgcccttaccctccttatctcggccattggtcatgacgttggccacccaggcgtcaacaattttttcctcgtcaaactcaacgcacctcttgctcaactctacaatgacaattccgtcttggaagcgttccattgcgccgccttttcccagattttgcgtcggcactggcctgccgcattcaaggacaatcagctgcgaaagctccttatcagttctatcctggccacagatatgggtgtgcaccagaagttcatgcagcgaatgggctcattccaagaaaagttctacgaaaacaaccaatctgttgatggctggaagcctcaagatgtcgacatgtacaagactctcatttgtggattactgatcaaatgtgccgacatcagtaacgtggctcgaccgtggaaagttgcaatgaagtggacgcaaatcctgcaagaggaatttgccaaccagggcgagatggaaagggaggttggaatggaaaccgcactgtttggcgggccgcccgaattagggaacatctacaaactggctactggtcaaattggattcatgtcgatattcgccctgccactctttgaaggcatttccgaccttctgccccagttgcagttcgctacggaccatatccttcgcaatcaggcacggtggcaagaacttgctaacgaagagctgaagaagcaaggtcttccaattgagaaacgggccgaggtcactgtttcgcctcgctcccgtagccctgcagcttctgacaagcagctcttcaatccaggagatggcgcagcggatagagtcaaatatccagatgatggatacaacgaaaacaccattgaaccagttgtgtcgccagatacttcaggtcctcagatcgagattacaggaagtcccctggcgccggtggctgaattttcatcacggaaatcttctaatgccatcccggacctttcttgtttctccatcccaggagccccggagtctgcccatgggtccatctcgacacagcttcatagccctctcacagaagcaagccccgttaccgacgatcctgctattttagccgccgtcttgtatgccaactcggctctcggtaatgggaattcgccagtggggcgtggccatactttcggggctgccgagagaccaagcagctcccgccaaggtctttcacatggttctcaacgcgactccgaacgccaccatgcgcagcacagctcctctgcccgcacgggctctaatcgcaatagttgtacacggacgcaaagcacttacagcaacaccatgacacctatatctcccgcaactaatgcctcgagctttttagccgtggatagcggcgacgaaaagcgaggctccggggaaagtgccgcgccaagtgatattggaggacctgaggacaatagcacacgtcccagcacagcggacgtgtatccttcaggtttaacagcaggcggtttcagccccggtcgcgactctatcgctcgtagtcaagctcgatccgaagatggcaccagcaaagacttctccaggctgggagcccctgggacccgcagcacgactcattcaacgactactggcgaaagcatcaaaaatgaagctcctccagcggatgactctcatggtcatcatagacttcctaagcggaggagtcggcttcgacttgctttttggaagcgtcgtaaccattcgcacgaggtccccggtgagacatgaatcttgctgtcctggttggtgcttttaggcttgaacaacctctagctgtgtataatgctgccatggtcttatgaacatttcattctccaatgaggcttgagaccacactggtgttccatgaattcacgactcgaccagtcgaagaacccgatcaatgggttttcttttcccgccgcattggctctcctggtcacgactctacgaagtcgatcacgataccttcttaccttctgctggacgtccgaggttgtctcggacacgaaagcaaatgcaaagcttgtctgagcaattacagcatcaagacaagataagttgcatgttttactctactctcctccctcggggctgagagtcacgcttttatcatatagtcctctcaatggatactgggattggtgtcccgctacatctagcatctgattatttgcatcgggctcgcccacctacttctgtgtgatgaccacgaatgtctgttttctttcatccttaccttacaccttccttcatccctctttctttttcccttctactccaccattgtgtgatatttcggggcggttatttcttatcctagagttcggtgataggccggcgtttgatctcctactggggtttctttgactcgatattcgggatccttcgcgatcttggatagtctttttctctttctcccctgtgcttgatcctcttgtgtttcgttcttttctctcttctttttttttttttttacattgactcttgttagactcttccgctctgcgcgataatgaatgtgatgtgtatagtggcttgtaatgattgtaagatatgtagttatgttccaagtagtatatatgatccagcatttatgccaacatgatctaaaaatgaactccatgaagatagcaagtcaaaacaatacccaataccccctactgacaatcctcacaatccgccttacccttactcttttcctcctctttcacttccttctgctcaccctgctgcttctttaacgcccgatccgtgtgtcccaagtctctatcaggagcaataacatttcgcacaagtgacttgagcgctttgacttctgaggggaggaaggaatggtcaggacaaggctcccatgcagtaaataagaatgcatagaagaatatgcagtaataaatgacaaaaccaaaggaagaaaacataccaggaaaacccccatcccgcttccgatcccacaaaatgctctcctgcgtcgtgatctccccatcattcatggtaccatgccatatcgtcacagtgaacacgccgccggttttcggaacgagggcgacttcgccgaggtctgtgctgaatgttgagagaagttcttgggcgaactgttggtttcttatgttagtattggttccggtttagtgaggtctgtatattatgtccacggtcacggtcatggttatgttggcagtgacagtgacggtgatatcgagtctgatatatatggtatgcaatagcaaagtaacgaatcacacttcaccccgccgcagaaacgatacaaccaaatatctctaacatgataggtcaaataggaaagataacaacgtacgtatgcggcgcggagcatccaccggcactgtgtgcagaactggattgagatgcgggggagatggacgttggcgggtgcaattgtgtcgctcttattgggggttgagtctaacggggtcaatgcagattcggccatcatggactgttggtttgatgttggagaatgtattgggggcgtttgggtgattgtggtatggtcaagtcgatgtctcgggatggatggggatttggatgatgtcagcggggatgggctgacttgtgaatatcaaattacgaaggtgtatagtggccaacagtcggatgcctgattttaatggttttatcgcctaattgggactagctcttaccagttttagaccgcctttgacaccgctcaataccatcttttgtaagtacacatcgaagagacgaaactgttaccatggggtaattcaaatgccttctacctattttaattctcaaaactacattcaaatattcgccacgccggagccagaggatacggagagtttgaagtttatacggtcggtaggaatggggactttgtgttgaaatccaggcttggctttccaaccgttttgggccttggtgtcagttgcgctattagcttttctccgggaaagtgcgggactacggcgggtatgaatggctttaaatacaggagattcatatagttggagggccttaacgcctaggatcgatgagaaatagtattttggggggggggggggggggtatgcaaactttctttttccaatttttaaccnnnnnnnnnnnnnnnnnagatgggggggggggggggggggggggggggggggggtatgaatagcttcatgtttcaactttcaagctgttctcaatttggtactaggagatctgtcatagtaattcaggtattttaatttcctgccggtctaaaattggtaagagctagtcctaattaggctataaaaccattaaaatcaggcatccggctgttggccgctatacaccttcgtaatcaaatcctgtcttacaattgcatgttacatgtactagattggaataatgcctgattcatacgttgtataccaaattactttgcatgacttctcaattgccaatttaagctagacaaggccgaaacaaccgaggggctgaaccccgacgggtcatcccagccgcgattgccggaatttggaaccgaattggatgaaaatagcgcaatttcgattagatcggtatggtattggtcatgcgaatctatgatacatgaatggcaactctcacgccctgaatggaacatagaggctttttgaagatttgaagagaaaccgtaagaaaaggttacataggagaaaatgaaaaggaaaaaaggaaaagaaaagaaaaagagaagataatgccgattccaaacaaaaaagcaagaaggggtaatggtgaaattcaaagaagaaaaaaggcgcaacaaatgcatcgtcaagtgcactgtctgcagagtctgagaacaaaggggaccggaggcgaaaagggcgacaaaacacaacaggacttgatccccggaggcgtggaaggtttcgtgcaggaccagcagacgattctttcaggccgacatctttgtccgcgcgagcaatcgcaatgctttgttcgggtccaaggggtggtcgtgaatgggaccgggattaagtagaagagaagaaaaaaggagagcgaaatcgaaatcgaaatatcatggcgaaaaactcccgtcgtgagtgcattacatgacggtgcagcaacccccctgttgctgaggagcgtagggatcctcgcgcttgtcaacctaggaaatgaagtggttagtctggatgggcgcgcgcgatgtggaaaaaggccggtcgcatacctgtccccatacggatggaaccataaagtcgcgagtgttgttgcagtagctgatgagactgttgaggtgttagttgtttgctttctgaacatagaaaggatcaaacggacgaaagagctgcctcggagaccttgacccgtggacggtccagatcctcctttagacgaccattgagctcggtcaaccgacgatatttcaagtcggcaacactctgcttcttgttcttgacatcacccccggatcgaagttcgtagggagccatcgtgacgtgttgagctgtggaagaagcgcgaatgggagaaaggggggagagggggtttttggatcggcaggtgttccaagggcgtaagaattaggttaggggggggggccgggtaatcagggggccaagacgccggacaaagaggaaggggaggaacaaaagaaggtgaaggagtcgggttagagtaagagagagagaatggacaaatgaatgtgttcagaggggattttcctgaggagatgggcaggtccgtgggtttcccttttttccttacacgggggatattattgggaggggaggtacccggtacttggcatgagtcggacgactactaatgtttgataggtggatacagtacataacttgtaccgggtacttcctgtctgaactctggattgtgtatatttgtcgggctcggaatgagatagttggaattgtaatctttagttacatgacttggaatattgcagtcaaccaataagaaaacatagtcacaatatgcacggtagtcaaatatgacaggtgtctgactatgtaccgacccaaattcgatatctgcctcaggccacaacacgtgatcgtcatcgcttaacgcgaagtgggaacattggcgggatccaatttttgctctggcctcaacacgcacattgtgaatcttcccctcgttatcgggtattcgcgtggcagtctaatcgcattattccctgcccgtgtgtgtcgctggcctcacccaactttttttgtccattttttaatttcttatcagtcacctttgatcctttcccaaggggcatccacccatcatgccgcctcctccgcatattaagcctgagaatgtcctcaaggtaagcgtcgccgtcgctggcgtcatggttcataagatgcatcggttgctaatgactatatcgtgcacagagggctcaggaactcatcgccgtcggccaggctcccgccgccttgactgtcctccacgaacatgtcacctccaagcgcacccgtagcagccccatcgcctccctcgagccggtgatgctcctgttcgttgagctgtctgtcgacctccgcaagggcaaggccgccaaggatggtctttaccaatacaagaacatcgctcagaataccaatgtcggcactatcgaggttcgtgttgatgatcgctctaaaaaaaaaaaaaagatgaaaaaaagtgtcttgtcactaacttaggatttcttccatgtgcaggttgttctcaagaagttcatcgaactcgccgaacagaaggtcaccgaggcacaggccaaggccgacgagatccaatcgaccctcgagtccgccgctccttcctccaacgttgaggatttggaggccatcgagacccccgagactatcctccttgcaactgtctccggtgagcagtctcgcgaccgtaccgaccgcgccgtcgtcaccccttggctcaagttcctgtgggagacctaccgcaccgtcctcgagatcctgaagaacaatgcccgtctcgagataatgtaccaatcgactgccctgcaggccttcaagttctgccagaagtacgcccgtaagaccgagttccgccgcctgtgtgagctcctgcgcaaccatgtgcagaatgccgccaagtactcttcgcagatgcacgccatcaacctgagcgacgccgacactctccagcgtcaccttgacacccgcttccagcagttgaacgtcgccgttgagttggagctgtggcaggaggctttccgcagcattgaggatatccacactctgttgaacctcagcaagcgccccgccaagaacattatgatggccaactactacgagaagcttgctcgcattttccttgttagcgagaactacctcttccacgccgccgcttacaaccgctactacaacctcctccgtctttcttcagtggccctggccagcggccagagttccaagaaggaaaacccgtcggtgaccgagctcgagatgaccaaggccgcgtcatttgtcctcctttccgccctgtccatccccgttatcagcacttcccgctcccgcggcgccctggtcgatgtggatgaggctcgcaagaacaagaacacccgtctcactaaccttctcggcatggccacctcgcccactcgtactgtgctcttccgcgatgctctgaacaagggtctgctccgccgtgtgcgccctgagatccgcgagttgtacaacatcctggaggtcgacttccaccctctgtctatctgcaagaagattacccccatcctgaagcagatcggtgccgaccccgagatggagaagtacgttgtgcctttgcagcaggtcattctcacccgtctgttccagcagctgtcccaggtttacgagtccgttgagctcaagttcgtctacgagcttgcccagttccctgctcccttccagatcacccccgccatgattgagaagttcatcatgaacggttgcaagaagggtgacctcgctattcgagttgaccacatctccggcgtcctgactttcgactccgatgtcttctcttcctccaaggctacccacgccggcagcagcgctggctctgctgagagtgagtttggctctgttcaacgtctacagcacacccccgccgagattgctcgtttccaggttgcccgtctcgccaagaccctccacatcacctgtatgtacgtcgatccctcctacaaccaggctcgtctccaagccaagcagactgctcaggcccgcgccattgctggtgtcacccaggagcacgaggagacccttgcccgtcgtgtccttatagacaagaagaaggaagccgctaccgatgctctgcagcggaagcagcgcgaggaggagactcgcaagcgtgtccgtgcccagcaactccaggatgctgagaagcagcgtctggccgatgagcagcgtgatcgtgagctcaagcgtatgaaggatgagcaggatcgcattcgccaggaggagctcaagaagcagctcgaggagctcaagactggtgttaagggtattgacgtcagcgagatcgaccttgacgagcttgatgccaaccgcctgcgtgccatgaagctggctcagcttgagaaagagaagaacgagctgaacgaccgtatccgtaccactgctaagcgtatcgaccacttggagcgtgccttccgtcgcgaggaactcaagtatatttccgccgattacgatgcccagaagaaactcgaccgagagatttacgagaagcaggtcgctgatgaactgcgtgagtctaaggagaagcataccgaggccgttctcctcaagcaccgtctgggtcgtctggttccccagttcagcaacttccgccgagaggtttccgagaagcgccacgaggagttcgaaaagcgtcgcaaggccgccgagcgtgagttcgaggccaagaagaagcagcgcgtcaaggaggttcaggaacgccgccgccgcgagaagcaggagcgcgaggaagaggaggctcgtcaacgagaggagcaggagcgtgccgagcgtgaggagcaggagcgcatcgctcgcgaggaagagcgccgtcgtgtcatggctgaggagaaggccaagcgtgaggaagagcgagcgtcagtattcccctattttgatttcacttcaaaccttagtactaacttgacatatagtaaaatggatgaggtggctatgaagcagcaacagcgggaggccgaagccgaagcccgccgcgcagcccgcaagggtggattcgaagagccactcgaacgaactgcaccccgtctcaatgtcgccccacgcactggagtcccgtccacctggagagaacgtcaagccgccaaggaagccggtggtgtcccatccgagcccgctcgtgagcccgtccgtgtccccgtccgcgcccccgtccgcgaagagcccgcccctctccgcaagggtggatatgttccccctcacctgcgcaccggtgccgtccccagcgctggatctgcaccccctccacctgctccccgcgagcctcgtgaatcccgcgacactctgccccgtgaggcccccaccgagcgttgggcgccccgtcaaccccgcgaatcttcttctcagtctcctgctcccgcttcggaatccaagcccgccgctggtggcaaatgggtcccaagatggaagcagcagcagtaaacgaccgagctacgactttccagttaaaaagtgtatccaagctcttctctttttggcgcaattctcatgacccttctgcatatttcgtgtatcattcacccatgttcaccccgtaacttgttaatgggggccccagttctgtctttcagctcgctcggaatatgatataatcttttcctagttttcgctataatttggtggtcttgtagatgttttggacagctctctttcttcctatctacggacaatggtggtttgagccgatgctaaccctcgacgacatcattggccccgcacaggtacaggtcgcatacaggcatgcatctagaagcgggtatattttttaatgaattatgaggtcgagtatagaatagaaagcatgagtccatgaagcgaattggaatggatggtatcacgatttcaagtagaaactgggaagctcgctcaacatgaacaactttatgaatgatgatatagtaaacatcaatatggatatctgacaagagaataagaaaataaaagacaacagtctaaattccgagtcctgacccgaggaaacagaaacagaaacgcaaaaagtgatcaagtcatgaacatcaacatcgaacttatgcagcagccacttcggcattagccccaaatagcttctcccgccattccccacagacagcttcaaagccactgactacatcaccgcagaccttaccagcctctcggtccttgagccggcggtcccactcgccgcgctcgatccaccgcgaaccctcttcgcggctctcttcttcccgccggatgtcagcgacgagttctcgcgcagagcgtaatcggcgggaagccgttgcagtcaattgtctcgattcgtagagggtatcgctcaagccgcgaagtgtatgtgtgatatctgctgtttgcgagatgagggcttggagagaggctagggggttgtgtgcggaggactgaggggttgttgattgggagtcttggtgttgttcagggaagggatatggaagatttggcaataagccctcgtcgataaggggcatgagagagtcgatggcgtcttcggaaaggagggggaatggagagaagaggagtgggtggacgagggattggagggcgcgcgtttggtgggtgagatgtgatgtgattgaggaatgagcggtgataagtctgcgactgaagattagctatcgagatcggtggaattgcgtcgtacttcatgaacttacctcatggcactgttctcaatgccactctgcccaccaagatctttcaaggactcgaccgtgcgctgaatgacatggtcattttcacttccattattctctataccccgccgaacgagactctcaatctcagccatttggctctccaaggcgggggatatatccgccgcctccagatccgagtcaggcccataatccgagccatcatattgcgactcctgccggcggtgctgccgcaaatgattggcacggtatttgttctttgatggatggagtgaatctctttctggtgagatagatggtgaccgggactgcacgctgtgaactgattgcatatacatatcttctccatcactgtgacccatgtgctgtgaccccgcacggctagcttcctggcctgacgcatatccatatccatcttcctcttctccccatgcatcagctagctcatcggccaggtttcctagtcctccgccgcctgcatcagcggcgccagagaaatccccggaccctctatgggacccactcatggcgttggagttatggcgggacgcggcaggagatggaggtgcagataatcggggtgtccgcagtgatctggggctttcaattgcaaaagtattcccagtcccgggggagataggtgagtcgtctgtggccgccgatgggtagcggtgtgggagtttcaggggagacggaggggggggcattggttcgttggaggtatcacacgggatctcctggtggaagctttactgaaaagctggagaattgggttggggcaatatagccagagaaaaggaacaagcggttgtagtctagttgcaggcgagcaacagttgttgattaggacgctgaattgaatggtccgatatctccgatccgggtcaatatatagcgcagtagcaatggaacaaagaccaagctacggtcaattgatataaagaacgcgttaaaagagcgacttctcaattaaggagtgactgcatcaccaggatgtaggaggggtataacacaacaattcatcttcaacctcaccgccgactactactcgtcaccgcccggcaaaaaagaacaagagcatcaaaccccacattatcacactcatatttcccgatatcaagatacccacatgagtattttcacatttataataccaagatgagttctattgaacgcatgtccccgttggacctgctagaccttaaccttacaaatctcgacccgctcactgagaattatgacctcggcttctacctgaactacctgaacaaatggccctcattgttcagcaccgtgaaggaccatgatgccggcattgtaggttacagtatgttgaattctccccctagcttggcacatcctccttaggctccctggatatgactgacatgttccttcgtagttatggggaagctcgaagagcagcacccagcaatgcgtcactccgagcactacacaccatggcatggacacatcacagtcctgaccgttgccccagcctggcgccgtctcggatttgcacgcaggttgaccgaacagcttgagcgaggatccgacagcaacgacgcctggtttgtggatctctacgtccgtgccggaaataaagttgcatatgacatgtacaagggaatggggtaagtgtggcgatatagatacgtccatgctgaattgatggctgacgtatagttacaggtactctgtcttccggcgggtggtcaattattatagcgatgatccatcggggatgtcggatactggggaagatgcgttcgatatgcgcaagccatgcagtcgagataagaagcttgagcacgtgagagaaaacggtgagaacttccctgttgggccggaggatgtgatgtaaagcatccttctttctgtggttattgaagcagccatggctgtcattatttactatctctccccttttcttcgagggattctcatggaatgggggggttacgcagggctggggttttgatggatatttgtacaaaattagacgtatgatagttgccattttcgtctaagtataacatgaagtgcgctgtgtctcccactggctgggaggtaatgcaatatgcaaaattcaaaacgatgaccgaatgatgaagctaatggtataatcgttgttcaacatgtgtatgcgaagaaatagccggaacaaggccgaatcttccggggtggtgggcggcagccaatattcaaaccttggcatggaactcaagacccgagcgcagaaatctaacacaggtcataagaaccgtagaggtagcgagacagcacgcggtgaaaagctgaactccgagaaattggtttgtatcggccaggattgcaccaccgatgggggtaccgatcaacagacctatggaagtgatagcaaagaccatacccaaccgagtgcccagattgcgcacgtccggagtcatgcttgccatgaccacaggtggcagagacacaaacccacccgagaagaagccgtagacgacggcaagaatgatgatgccaggtacggtgtgaacacggatccagacaaaggctaggatggaagtgatggtcacggcgggcgtgagcatattcaaagggccaacgtggtcggcaaggaagttaggcgcaatacggccgaaggtggaggcggcgtttagcatggagagtaggtagaatcctaggttcgagtctacaatgcctgtctcaattgcgtaggactgcacatagaaaaggaagttgtagaagcccaagaagcccatgaacatggcaatggcaaagacagtaaaggccggctcctttaaagcagacaactggtagagctttcgcttctcctttggctggaagcgcgagcgcatgatgctaatagaaaaacaaatggtgccaaagcagacgaatccaagagatcgggtagcccaggcaaaaccgaccttcttctgcaactgatcgaacatgattgggtagattacaccaccaatactgctgccactggcagctaagccattggctagtcctctcttacggtggaaatactgcggcaaaatggcaacggagggcacgaaaagacagcctgctgcaagtccgacacaaacaccttgggaaagaatcaggtgccagtatttagtggcaagactggtcatcatcaagccaaagggcagcatgaatgcagcggtgatgaggagggatcgaaaatagccggcatcaaacagtggacctgtaatgactccaatcatcatcagaaggaatgactgcagcgatccaatccaggcaatggtcgatgatgaagtaccgacgagcaactctcgctcataataagtttgatatgctccccatgtattgatgattcccctgtttcaacgcattaacaataggatctttatactgaagaacttatatattcttaccatgaattgaaaaaaagaaagaatgagcccaaagcttggagccatgtatgtagccccgtatcgaatgttaactgaggcccaggctcttcctctggagaatgtgatatattggagttgacattttcatcgcaagtagacgaaggatcagcgagtactttttgctctatatctaagttagttgactccatgttgtttcatgtcacaggtgagagcctgtacaatgtagtcttagctgtgcaatggtcaagaaagtgacaatcaatgatataaaaatctttccagttgattataaaccccaaaccaagcggggttggggtatagggcgggcccccccgagatcggccattcggccattcgagagatataagaaagataaccgggctttcactcgaatatgatatatagctggacctggatatgttatagctacttgagatttgttgaaataacatagtatatcctttgtcaaccaagtaaacacccttactgacagcaaatcggtcgaaaccaacctagtcaccagcgaggtcaatgcactaactcagatgtaacattgaatagccgaacttgtttttcgtcgagaggacggtcttaacacaggcagacgtgcctggaatacagatggatatggaaatgactctaaatatcttatcaagtgcatccagatgttgatatcaaaattgtaactggaagtatacagacacaaaagtatatcactgaaatcctgacaatactcacgtggccgctatgattgcttctatctgcaggaagataaacaggtcaaattatttttagatatgtttttttttccgttctagattcatgtacaaagcctcattggtgtccatgtttcatcaaggacatccaagtctcattttttttgacgggttcttcgaatcccagaactccaaacgctatgctgaaaaagaaaagcaaaagatataaaacagcctccgtggagagcagttgatagagaacagttgataccggtttgaccactacagcagctcctcacatgtccaatcctcatacctaaagtcgaacattgttagacctggcccaccaatcatgtctgacaagatattgcttaccatccatcgggcaggtatcggcgaatgatcaagggaatcttcttctggttcaattccttcatggcgatctggaggggatcggtttcaccttcgaggtcgacaagaacgggggcgttcatactatgccaaatgtcaacaagctcaatttcacgtaacaaatgcgcaatcatttgcagcaaaagcaacgtacctgatttgcagggcacgggtaccaagaacacgcgcgcgctcgtacttggtcaagtacggggtggtggtgcgctggtcattgggtactttcttctcgcgcgactgctccagcacttttcctgcgtatccagcatttggatcgccagagacaacgacattatcgccgttggtggccgggtaatcatctcccccaaccgtgtcttcgccctcgaggccctcttgttcctccggctcctcatcaaacacatcctcgccgggctcgtagtcgaagctgcgcacaccacattgttagaaaacgggtctatacaagtatacgcgaacacgctgtgaagctgccaggaggcacaatggaagcaaagctcctttgcgcctagtccctgggcaatctggtgaagggtagcttacgtctcttcgacgtcgtcgtcgtggccgtagtcagacataatgacagttaaatctgcaaaggagcgaactgtttgtaggccgaagcgagcgatgaaagacccagaggtatgagagacaactcgggggtcgaggtgggatttgatgctaaaaatcttgggagcggaaaaacttcctctgtgttgaccgtcaccgcctttctggcaaaaataaaaaatattagtttggcattgacgtccgaacttcctcatgccttgagatacttttcctttctcaatcgtccttttcagggcgtctcatgatggccatgaaacgcaaggcctcatcggagggaatcacaaccctcaaacgacatcagaaggataatgtccttgacaattccggtaagtttacgtccacaggtaacgtccaataaagtgatccaatttctgaccattctacagatctgatctaccaggagactcactccgatgcagagtattcggctcctagtactccaagtttaatgagcgaagacatggacgaatctccggcgaccccattctcggccacctcctcccgacaggtatacccatccgagctcaaaaccctatcttgtccgttcgagggctgcgataaggctttcaatcgtccagctcgactccaggagcatatccggtcacacaataacgaaagaatcttcaaatgtgaggttgaggactgcgacaagacattcttacgcccttcccatcttcaacagcatgtcaagagtgctcatacagatattcgagactacgtttgcgactatcggggttgtgggaagagctttgtgaacggatcacggcttcgccggcacgttgctacacacgatggacataacaagtaccgctgtacggagtatccaccttgcgacgagacattccggaagcactcgacgctacagaaacatgtcatggttgcccacttgaaccagaagccatttccatgtgatcacgtggacccaaccaccaaggaaaaatgcaacatggcttttgacaaggctggtaatctacggacccaccagaggagagtccattccgagaaacgattcacatgcgcagaatgtgccgaaaatatggaagctcaatcatcaaatatggccgacgacgatacaaaacaggatgtatcattccccacgtatgccagtctacaaaaccatattcagattgttcaccctccctcatgccctgagtgtccattggtctgttcgacagcacgggggcttcggcgccaccttgagatagcccatggcaatgtcactcttgaagaacgaaagatcttccactgcaccgtccctggatgcgggcgtagcttcaccaagcaaggcaacttgaccgtccatattcgcacagtacaccaaggcgaaaagcggtttgtctgcggcgaaacggatctttcaaactccaacaagctggagggatgggacggcgtcggttgcggcaagcgctatggcaacaagctgacactcgaagaccacatccgcacttcacacttgggtctcccgaatgccaggaaacggcgccaagcgaaaaagacgagcaaaaagccggcgcaggattcagtttccactctttctgccctcacgggccaaggctacgccgaggaaacaggtcgacagatcgcttgcttttaccccggctcgtgcccacatcgtttccatcgcaactacgatttgtgggtccacatgaccaccaaacacagctgcaccgaagatgaggtccagaacctcttcatgcagcgcgcgttgcttacagatgaaaccagcgctggagtcaactcgctgggtatatatggtcttggatatgatcaggatggtcggtcctactgccatcaatcatatgcggcaggagatcactcttcggatgttgctttcggctcacagtcgaacgattcctcctatctccctagtcagccggggttggattctgattatttgatggcagatgattctccagcaaggacagcacattcattcttcaatacccagtcgtaatcaaatggcactggttgacactgtttgtgcttaccattagatggaacaatgatgaagggcatttgtacgatgttatgattatctagcgttttgatgcatatccatggacttttcttcaaagttcctatttctcaacagcgtgttgatttgatattttgacttgacatattcaattcaccaaggagcggcttcaaaatgaattccaatgttaatactgatcatctatgtagccttttagacaccgtagcatcaggcctagagatcaggggtaccctcgccttgttatgactggcttatccctacgtggatcttaccctcccagaacgacttcgttgccaatggttgaagctattgcgtgagacggtggattttatgtaatgttctagctcggccaacgcactaaagttcttgatcatagtttatgtcattatagtacttcattgaacgagtgaaagcgaaagaacctgggatatcccatcaaacaaccttccaaggttcgtttcattagctcccgccgtggaactcggacccacttttaatccactttgggtatagctctctattaatttgtacaacaaactctgtaccgtacctatgttgtaggtaaatatggatatagtatcatgtatgtactctgaatatctggctcagaaggagataagcttcggattttgaaagcagactcctacactccggcccaaatccgccgtggatgcagtgaaagaataccctaatcgattacggatttcggaggcaaagtccgcttctacactcaaggggctgaatctgggatagttatgagtgtagtgtatttacaatcaacattcgaataaaagaagtataatctatactatatatctatcatgattcggtagtcatcacagtatcaataccaacaaatccttcactcgaagcacttggccggacatcttctcttgcaatggccgagacgaaatcttccaatttggaaaatcaagatggcgtcgagatgagtgcttccatccataatacagagctcaagcgccaatatccttcgggcctggcggtcactcttatcctgacatcagttactctggcctatttcctctttttccttgatcttgctgtcatttccacggccactccagccattacttctcagtttgactcactagtggacgtcggttggtaattacatatccatttacttgtctaggccacaactgctggtcttttgtcgcttttttccgagatgctgatctctctaggtacatttcagcccttgagcggcaagatttacagccgattttccatcaaggtatatcttggttcaagcatcgtgactacgaaagtcaactctgacaagatcatcatatagtggacctttcttgtctttttcgtcatcttcgaagtcggatctgctgtatgcggagcagcgcattcttcggccatgttcatcatcggccgtgttatcgcgggtgttgggtctgctggtgtggccaacggtgcagtaacaaccatctccgccgtcctcccaacacaaaaacaggccctttttatgggactcaacatgggtatgggccaggtgggccttgcaacggggcctattattggaggcgcttttaccacgcatatatcctggcggtggtgtatgtaattccacttcttggggtgatttttaaaatgctgaagtttctatattaggtttttacattaacctccccttgggtgttattgtcggcgggttcttctctttaacacagtgcccgagccaaagcctaaggatccgcccctgcagattcttagctctgccatcaaatctctagatctcccaggattcatgcttatttgcccggccgtcgtcatgttcctcttagggcttcagtttggcggtaacgattatgcctgggatagctcggttgtgattggcttgctagtcggcgctggcgctacctttgttgtcttccttatctgggagtggaaccaaggggacaatgctatggtgccacttgctatgcttaaacaccgagttatttggtcggctgcactgacaatgttctttagcttgtctagtgttcttgttgctgatttctacattgcaatctattttcaagcaatccacgatgacacgcctctaatgagcggtgttcacatgctcccaatcaccctcagtatcgtcctattcactatggtttcaggcaccctaagtaagtgattataattataattttgtccactgatcatcgctaatactagaaagtttccgttttgggctactatctcccatttcttcttgcggggggtgtgatatcatctattggtaatggactcttgtcgacattaggtgctaccactccggttgcaaaacgggttgggtaccaaattctttacggtgttggaagcggttgcacgactgcggccgtaagtccgattcttccgaggttgacgaattataaccctatgctaatccgtaccttcaatttagccctatatcgctatacaaagcctcgtggctccagagcagattccccttgctatggccattatcatcttctcgcaaaatattggtgccgccatctctctgatcgctgcgaacgctatctttagcaatagccttcgttcggagcttcaaaaacgcgctgcacagattagcgtttctccagacgccattatcaatactggagtccgctccatccgtggcctggtgtctggctccgagctggccgctgtgctcgcagcctacgccaaaagcatcgacaaagtcatgtatctcggtattgctgtcagcgtcgccgtgttagttttttctccgggacttggatggaaggatatcaggaaggtgaagcttcagctcattactgaaaaatctcctagtgtaagtgataaagatttggcagtgattggagaaaattagggtcgtttgtcagcaaaagaggtatattcatgcttcttcaatatcctttcggcatgtctaccgacgaggtggtccactggttgttccactgttcttttagagagaatttccttttctaggctgaattcttgtccggacagtttagataacatttaatactacttttcagtcacatgcttcactgtcgataagttgttcgatgcaaaagataataacgggatccgcattcacatttaggtatggggaccatcaggctatcttcgtcggtggcgtccctttcgttcttgtgtgcacttgcatgtttatttgaccaacaagacatacctaagtgagaaggtttgatattatagcatgaaaagttactattgtatgtaattttgcatgagtatataattgatcctgtactgctttaactaaactttatcctgcaaactgggtatcctttttcactaagctaaagcattacgacaagtttctttttcgaaacaccctttctctgatggagagcctcttggatattatctagccttttgcccacaagatgcggaggaggaggtggcacaaactggccttggtcaagtgcccgtggtaggaaatccatgtagatatgagagacgacgctatcggggtcaactaggccattgagaagaccgaatttggcattcactccggtcctgatgcgcgtctcgatcgatttgattataccccccatcatgccgatcaagtacgtgcctttgccaacaaatgtcgtgagattctcggaagatatgatggcgcccgccacagtaatgaatttccgagtgagtttaggataatgtgtcttcataaccgcagtgcatgcctcagcagcaccactgccaattgtgtaggcgccaaccagcttgtggccttgcagagcaacgaggaggtccttgaccaaacttttgctcctgtagtcgaagactttagtggcaccgagacctttgaacaggaaatggccaatggtttgaagatgtactactaggtatgccacgacatttactagtttattgtaaatgatttggagcctccagagacgactagtgccactcgggagaacatctcaccttttatatgggtttagtcctcgaccgacaaatcaatgctcggatttttacagagagcctccgatcatcaatacgaaaaaggaaaagtgtcaataaccttgaaataaccttatttccccaacgggcattattaaccgtggaaccccaccgacacgttcaaggttgttgtatagagcggggtccagatgaaaaagaatcgcacctctaaatccctgccacatggcggatctgcattttttaaagtacctatgacgcgttggtcggatctccatgggggccatgctgatcttatgctgcaggtcagcaaatcttggatttgatctatgccaagactgcgaccggctagtataagacattgtaccgagtacgtattatatacaccatttgtattccgtacaaactagttaattaagttccaagtttatccgagcaaagattgtggctggatctaatgcaggaggtcccggagtaaattgaaatgatggttagctacttatgtactgtagttgagcatggacttcaatggtcggtgaaaaggcatagcgtgttcatgcggacccataggaaacgcaaggaaggcaacgtgtgagggtcaatgggcagaatttgccaagccaagctcacttccgtcgagagccagtagcgcggatgccagccttggccacgatgggaagtcttgtagaattaaggggggaaattgggaaaggagatactatttagaaatacgttgtataactcaggggaataataacatagttgccttatactagtcctctgtgctctgtactccgtagttctaacataagacatcctatatttatccacccatgcaaactagtctacttatagtcggcttgtctctccaccgatgatccaaggggataacgccaatgaaaaacctttgttcaaggtctcaatgcaaagagaaagaaaaataaaacaaagcagatattggcttggcttcagcttttcaagtgtcgcacgagacaataagtatatcattggtgtagcgtggaaatgttggaaggtcttctcttcgcctccgggacttgccccaactgatccacagtagttcttggtcttctctctctatcttctcttcaaacctccctattattccatatcccattcctccacctctctcttttgctggaaattttttaaaaaaggacccgttaatcccggtgattagcgacgtattcggcttgtaacgtcatcttccttggcaaagaagctcgacttccctaacctccaacccaaccactcgtttttttttttttcattcttattcttccaggttcacccttgtgtggattctatggattgatctcttcgtcgccgaattcggtctaggcgcagtcgctatttcacagtctctcgttcagcgcaatcgacctgcctcggccagtttccttttaaatcctaccacgccccagtctctctccttacctgcaaggcgtttcacagtctaactcggtgaggggtaatactcaaaagactactgagcttcttgtccgcacttcacgttccgacgtcatgggtcgttcgcgtggtaagtcgatcctctccgggtatgccgggaatggcactagagcccgttattgactctcccttgcgtggaactagtccgctcgttcctattcagttttgggggttcaaagaatcatgcttctgggaaagagagcaaaaaattgtcgagcaacgttacgccggtggccaacgtggccaacgtaacctcgtccgatacaccaccccagtggcaaacccctcccgatacaccatcccctcctcccgaagcatcccctgtgagctcaggaccaagaggcggaaatgcgtcgcgaccggcatctatgatcttctcacggaacccgcctctcatgcatcagacgggcgataccccaccggagctgtcgccaatcttttcgttcctcaatatccacacgaataagctatatcatgaaggatactttttaaaattgaatgatctggattctcgtaagcgatcgctggccttggtgcattgcggggcaagggctaacacgtggcagatggacggccttctggtgatcgacaatgggtggaatgctacgcacagctggtcggaactgttctttcactatgggatggcgctgcgctggacgcagcaggtggagaagaggttccggctacctttatcaatttggccgatgcgtctctcaaaatggtaagccttacctgtctgaatcgtcaggcatggactaatcagttactcgcagattgagactcttccgattcaaaatggagctatagaaccgttgaagaacgtactcagcctttcttccgctggcaaaaatcgatacctcttgcatttcaattctttcaactcattgacccaatggactgcggcgattcgtctctccatgttcgagcacacatctttgtacgaagcttataccggttctttgattgcagcgaaaggtagagcactcaacggaatcaactccatcttggcacccaccaaattcaagtacgaagattgggcgcgtgtacgatttggagcaggaaccccgtggagaaggtgctggtttgtgatctgcccgccagatgaaaaagagctccacaaagcgcggaaaatcatgaaaaaatcggcatatgaccgcttgtcaatgccagttaccggcaacatcaagttctacgagacgaagaaaactaaaaaggtgactcccattgcaacggttactaaggtttactcggcatatgcggtttatccacaatctacggctataattgatgcatcgaccctggtgaagttggaaggacggattaccacacattcgcctgattcttcttcggagggacttgtctttatcatgcctgagccacatcctgcggtttctggattcgagatgatgctgcgcttccttttcccgacgttcgacactttcaatctctatggccgtcctactcgcctggtggcagacactaatcacatcaagagcatcatgtttgccttccccaaggagcgacggtacggctatcttgatgtgctggacattgccaaccttcttcaaaccccgggaagccaagaatggagcgaagctcagtggagaaaacagctcaaagaggcaacacagcgtcgaatctcgtctggtaggagcagaaccaatagtgtcaacagcgtgagacctcgttatcgctcgatgtctggccgacacagtgatatccctgtggactccactcggcgccagtatgctgatctcgaccacaagcctgggttcaaccactccaccgaggctatcattcatgaagtccctcaaaacgaggacttacccgctgtgtatgaccgcccggtttctgataacacaggcttcaacactggctctcggctaggccatgaatctttaatcgagagctcacctcactcatctgctcaagatctgatgcaccgtggtgttccagtgttcgatcctatcgctgagagcaccagttccggaagcgaaccaaatatcaaccacctccgaggcccgccagtcgaagaacagctccccccacgaaccccaccggctcctgttgaaaacccacccccattttcccatggacccagagagatgcccactaaccggccagaggcttcttcggagcagaggttggcaaacaaccggatgtctcacgcaacactttcccaactcacatcggtcggaactatgggaatgagcgcggcagccgccactgctgcatggaaaacccaccagccccaggatagggccttcaacggtgtctataagcctggaccgattgtctccgcaaactctgttgcaacttcatcgagtgatgaggatatcagtcttgctcttccggttcgacctccctcagttcctgagcatcgtccgatcacacctagtactggcagcccacatcggccttctccccagcagcactctcctcaacggatgcacattgatgccaacaaatctgtgcgacgcaagccactccctcaacaacagattttcgggacagagccagagtcaccagacgaaccgagttatgatgatcttcgccatacccttgatgaagatgcgctgaataaaattgcgcctcatcttccatccccagcgtcatctgttggaaatagaaacggaaacgaggacgacagcatttacgatgatgcatcgacagtttcgcctgactatgctagcacacacggttctgtctacagcaagaaatccgtcgcatccaccaaacctagaatgggtgtcatgaaaactgtgggagtcccagcagtcaaagattatgtcattggcgatgctcattatactatggataagcccccgacctcgaatccggatattcccagtgttgacttcggcccaactatgacatatatgcctactactgggcgcccaaccacatcagataccctgagaagaacaatgcatcaacgtaatgattcgtcggggaccaaaattgcggttccgactcaagcaatcgatcaggctaatgcgcggccttccagtcgcgaagaatatcgacgcagcatgctgtggcagcctggaatgggttctcgccctgtcactccaggtggaggtctaaccccggagcagtacgtgcagcaacgggcggcacccagtcctccggtgcaggtccacaatcgcaccccttctaatcccatgtcagtacaacgcccggtatctggcgactggacacataatgtccgttccaattcgcccatgagccctcagcgggatcccaattatcgaccttcgtctcgtggtgcccaaggtatcctcaattacaacgatgcttcaaccaatctttccgctcgtgaacaggagcacgttgcccgcatgactggctcttcattcttcaatatgtcaaatgacaaccgaaaaccacaggcgccagtaagccccatgggccttgtctcgcacatcgatgctcgggagcgcgagaagcgtgaaataagggagggaatgtcgaaccaggcggttcaacaggccattgcccaccgtcagcaacacatgatgcaacagcagcagtacgcgcctcagcagttcgcgccgccgttctcgccgccgttctcaccgccattctcacctcaacagatgcagacccaacaggctggctctgtgtatccatctcaacatggtcgccacgagtccatgtacaacattccggttgccagccacacatgggatgctctaaaccagacaatccgccccgacgaaccccgtcgatcgtcctggtacggacagctggctcctcaaacaccgcctagctatcaacaagaccagtatggtcaagaaccgaggtactacagccatgctcaatagaccggttctttcccttgggtctgacctatcattttgtcactacctcgactttcctttcgattttttcaacaacttattccctgcatattatcagcagcatcaatttctattctgttcaaatcgccattcctgcatacataccaacctttgcacctggcttccaacgcgttcatctttcacgcagtccttctcttttcgccctctaacatcactcattatttttcctttatctctcattgcttctttgcatcacgcatccaatcggagttccagatgggcgtggtgggatcgtccctgatttttcatgcgaatcgcttgcttacttatcattatcggggtccttgcttttactttttattcacatgttttgtgccagcatgtagatcagactcgtggaaatatgtggcctgtatgtacgccgtatagattgatcatggataccatacccaaccaggtactatttgtcctttccatatctgcattctttctattgttctctaaagtaagcattttgtagtagtaagaggtatgtacgcacatcgtaaacgatagttgcattcaaatgacatagaagatgggaaagaaaagaccttactacgctgtgaagcatattttccgaacgcaatcaagcaggatgtcactttacaaccggaatatctagtactccaatcatgtttcttttcaaacctcgctaccaatgtaggacatgctacaatatacagaattttagtgaggcttgtaagctacgacatccttctacatcctattagttcgccatatcaattccacgctccacacacacagttcagttcatacaatgataggtggtacgcccggaaggcgagcgcaaaaccggcctgatcaggggaaccctgttaccaatcaggatcaagtagactgtatctacggagctgtacattgtatgatgacaattattttgatatagaaacatcactgagcgtccttaatcggtttacgctatgctggtctgcgctacaacatagtctggtgtgatgtaaccttgtatatctatagtgccttgaatgatagtcgggtacaacgggtgtagagaatatatttttctattatacacttcttgtcgtgctatcaaccgttcttgccagggataaatgatttatacattcacagtatatatatggataatttcggtgaatccaatgggactacttaacccggagaaaaccttatgacagcacttctccacctaaccctctgtcttatctgtgaattgaacatgaagaaacatatgattgaacatagagactgacatttgacgtaacctccagggctctaatgacgtaatggagaacattggaatactggggaacaggttttccccggtttatagtggatttaatctagagatggttggatttaattggatacctgaccttgcttgtatatagaagtacacaaatcctagtgatagtgtcgaacggtcaggtcgccatcggaggtatatgagagcagtgtccgccacttctttacatactaatagccaccctgatatcatctgttgtgcaatttgcatgcatagaataagccatttgtttattcattctctatgtaccgttgtggacccaatatctatataatagacttaatcgactgcccgaatggacccttcagtccccgaaaatcccgaagcgtcgagcttcaaggatgaagccagcccacaagcaattaagaccgaagcaggacggggtgccgatacccacgctgaatatgcctccaactccgatacagcaagccaagaagacaaacctaagctgcgtactggtggcaagcccgagctaacagaagatgactgctacgaaaagctcggcttctgcttcccaacatggaagaaatggatgattctctccgttattttcgcggttcaaatgtccatgaacttcaacacaggcgtctactccaacgccgtccccggcctgaccgaagaattccatatcagcgaacaagccgcgcgagtcgggcagtgtgtgtttctagttgcatatgcattcggatgtgagctgtgggcaccatggagtgaggaattcggccgctggcccatcatgcagctctcacttctttttgtgaacatctggcaaatcccatgcgccctcgcaccaaactacggcacaattgtcgtatgccgtgtcctcggcggtctcagttctgccggaggctcagtcaccctcggcatgacggcggatatgtgggaagccgacgatcaaggctacgcggtagcctttgttgttctctcgtccgtaggcgggtcaaccgtcggacccttcttcggcggtatgatcggccaatggctcacatggcactgggtattctggatccaattgatcgtcggaggtgtaacccagattctgcacttcttcatcgtgccggaaacacgcacgacaattcttatcgaccgtgaagcgaaacggcgtcgtaagaatggagaggatatctggggcccggacgaactgaaaaccccgcgcctggactatcacgacgtactacggatctggatccggccattcgtgatgttcgtccgcgagccaatcgtccttttcctctccctgctgtcgggtttctccgacgccttaatcttcgtcttcaccgagtccttcgcattagtctttgcacaatggtcatttagcgttctagccatcggtctaacctttgcctcaatcctaatcggctacataatagcatacgtaatttatttgcccgacattcaccggcaaatccaaacacggcgccaatacggcacagccagccgtctcgccgagcgccgtctcctccttctcctcttcattgcacccctcgaaccaatcggcctactcggcttcgcctggacatcaaccggcccaccaatcccatggatcgcgccgtgcatcttcgcctgtctgatcgcaatggcaaactatgcaatctacatggcgacgatagactacatggttgcggcgtacgggccgtactctgcgtctgcaacgggaggtaatggctttgcgagagacttcctagctggtatcgcgaccatgtactccacgcccatgtaccagaacattgggaaaaggtatcatctccagtgggcgagtacgctgctaggctgtgtggggcttcttggtcttaattccgatttatgtgttctactggaagggcccggatattagggctaagagtaaattcgcgcagcagcttgctgctgatcgggagaggaatactgagagtaggagggctagtcgggctagggcttcggttggggcataattgtgcttgtggttgctgtatgatattcagcctttgtatagttgtatagttgctagatgcatatattggatagatgtgttatttcgtgagtcctactcttatgttgtagctttgagatgtactatcaaaaactcggttctgcttcttctagaaatatatattggaacagcagatccgcaatggcatcatgaaagagagagcgttcccatcccaggaacgtggggaagtatacatccgaaagaggaaagtggaccacgacacgtgctagtatacaaccaatgcatgctgcccctatgtcgtatgtagttgcgaattgcaaaaaatgtacttctcaatcacattcgttattgatggatgaatagttactcttagcccataatagcgtaatggcaaaacagttataaaggtatctcaagaacgccacaagtgccagcttccctcgcttccacgatgcttcaactccctttccactaggaaaagtgtctagctcatgctaggatatataatcctatgcaaagagatgtttcgtaaatcctatattatctctgactagatattgacatctagctcgaatgcagcttcttgacgcgcatagcaccttcatacagaccgcggtccaaagcggcagcgacagttaaagtaccaccaatgatagcacagacaccagtaaggaagttagtgaaagtcttcgggcgagcctcacggttgacaaccttcataggagagatatcgtaattgaagaagacgcctggaataccgccaccggcgtgcacgcgttccttgtggccctccgcagcatcatttccaccggaaagaggacgcttgtgcgaggttaccgagtactgatgagcctcgatactaccctgagtaccgtatgcgaggccgtgggagccaagaggcgcactgtcgtaggcgttgtgtatggcagtcgagaactgaggatcccagcctagaggtaagtaggacgtcgagacaaccttgacaaagtacatgaagttgtaggcgggttcgtcggtctcctgcttggtatcgtcgagtgggttggtgttgtggtggtctgtccacccccagcggcctgcgagctcggcggggagcttgggcccgaagcgaagctcgtggacgaagtgggacattgtgtgctggtccgccgggcccgcgttgggcgcgatgtaggcgtcgagatcgtggacatgcatgttgccagtggtgaagctgcggcctggtgcaatgtggaagttgcccacaaccttgttgaccttcagcacaccctcaatccgacatccctcacggcgctgctcagcgagtttctcggcatatccttcgcgcttgcattgctcgatgttgctgccatcgccaaaggcccattgcttctcggcgtaggcttcacgcacttcctcacaagtagtacagcatcccggtttgatgacggttgggggaggtgttgctccaccacattcaccgcaatagtctggagccagatgcttcgcggcgtctgatggagagtgtctggggaaggaagataatgagtttgcgatcgcggtgtgaaggatttcggggtggcaggactggcacttacaggtccaaagcctggacatcaatcactttgccgccttcatcgcgtgggcttaggcggactttgctcacgccatgggcaacgccgacctgctgctcaccagagacatccatcacgtccaaagtcaacagctcacatggcaaccgagggaaggtcatgttcaagtgaatctccattcgctctcctgcgcagcaaaattttattgttagcgaccttgccgaccttgccctatgcattgtatcttctgcaggtccatcgtggatccgatcgagcccaaactctattcatacctcgcgatttatcgacgacaagctccggcagcaccacaactctccggtagtcggcccattcaccccataccagccacataacaatcaataacgaagcaattgtaatgacacctccggagttcgtgcgaatacgagcatcttcaacggtcttggcgaaggcatctagcctcgtgaatcgcgactttgcggacatctcgccggtcaattgaagaccataaggtgaagcgcaaaggccaggcaagggtttgtggacagcggctgtatgtcaaatgtctgtaagacagataacgcgaataggtcagctaggtggtcattggacgcgcaagctctattagtgagagagaccaccaaacaaacataacagagtaaaggaaatagggaaggcacccataccaacaatagagtccgatgagtcagttcaaactcaatgcgattgagtattccaagcacctgacaatagagacaagagcaaggctaatttgaagcctcaagtggccaggcatacttgcatggccgatggatgtatgaggagcgtgaggacagacgacagcatgtgattggtcaccccagagcaaggagatgagtcatctcctaattaggcctagtaactgacaatgccgcctcatcacgtgccaatcgtcactttttctttgaactcactttacttattcacggccctattgttctttggtcattcactttcactttcttattgtcttgcagctgcactacataatctgcagtcccccctcttctccagtcttttcagtttgctttttctttacctcccaccttcccgagtcatatctccattgcgatttcctcacatgcgaactacttctttctgcctgatctgaggcgcatagcgcgctgctctcttcaccttgatcgtttcacctttctttcacctttcctccctttgcaacaatctccgataccccaccaacctctcaaatctctcctccaactacgatgaagagcatgaagtcccgccgcggcggcaatgatcgcgggggaatccgcaagcggggccctactcgcaccgaccgggatggcgacatggatatggattcgggcagtgcgcgtgcaaagagaacccgtgctgagaaatctgccttgggtggccgtgccgccggcacaggcgtaggtggccgagctactggaattagcaaccgggcccaggctcgtaccaagcacagggattcggatctttttgagagagcggtttacagcaacaatggccaagcaaacgttataagtggcaacaagaaaacgggcggcgatctggaacagtttagtgtccgaggatggaaatcaagcaaggcggcgagcaaccgtgatggcggccttgagagcctcattgcattccttgaacgtcgcatgaactcattcatcaaatccggacctcgcgccaagattacaaaggtatgttcctcgttcacaatagcggtcaccaacatcgattctcgacgtcccccgcttcagtgtcctcttgttttcgaggacgatcctcctacaaatcgacgatcgacacattttgggctttttggtttctttccctttgggtgaccgtagttttcaaggtccttcgcacctttctaactttcaaattagtcgcgcactgaaggtgacactctcgtggccttcgttcgacctgatctggcgggtcacatgcttcgaatcaacaacaatgttttcgccggagcccatgttactgttgaagaatacaccgctgccaccgcactcgatcaggaactggctgcagccgaccccgttcctggctcgaccgccgataccaagactaagatgacaactatcctcggcaagcgcttcttccctgctaccaagctacttgacttgtcgaagctgttggacgaccctgatctgcaagccatgggaatcttccacaacgtctctaccaagtccaaattcttccctgctctcatgaaggtctgggaactgggcttcaagactgtagctgaacgacgtgaagcggtcgaaagtgtcagtctggcggaaaacaacctcagcaacatcagctctgtgactaccctcgcacagtctttccccgatatccaacacttggacctctcaaagaacaacatcaaaaattcgcaggcgatgatcggatggcggtggaagttccgcaacctagttttcctcgacttgactgaaaacgaaatcagttccgacccgactttcaaggacaccatgctcaagtggtatcccaagctgcaaactttaaataacgtccaagtgcgaactccagaggaagtcgcggctcagaagaagacaccgatccccgtcctgcctcctcacttcattgacgaatctcaagtcggcgagaatttcgttcgtgctttcttccctggatatgataacgatcgtaacagcctcgtcagcagtgtctacgatgatcagtccactttctcgttgaatgtaaacaccacggctccccgggccactcaaaccgagacggcaggttggggtgaatacatcagaaagagccgaaatcttgacaagatcagccatctttctgcacggatgtcacgatccttcaagggcattgagaaaatccgtgaagttttcaatgagctcccgcccactcgccaccctgatcttatcgcaaaggcagagcaatggctcattgaatgccacccagtccctcatctccccgaccctactggacagagccccactggcgttggtggcctttccctcatggtgcatggacaacttgaggagagcattggtggcaagattgagatccgaagcttcgaccgaacctttattcttggccccggtaacactcccggtggcatccgagttgtcagcgagattttctgcctacgcgcttacggtggacacgaggcgtggtcgcctgagatccaggcactttcccaaattcctcagattgcagctcccgttcctattcccactgcggctcctacaccccttgcagtccccgcagctgtcccaggtggcaatgttcctgagggatacggtttgccccgacctggaaaatccgacacccagctccagcaggagcagatgatcactcagatgagtggcaagtcgggcatgactttcgaatactcagagatggccctcgcgggtaatggctggaatgtcgagcttgcttggaagaacttcgaacagctcaaggtaagctaattccgaggatggctccctgatttaccaaggaatgataactaacgaagctctacaacaggcaaccaacgcacttcctcccaccgcttttattgctccggcgtgagctttcactgtcatctggtttcattgaaatcttccacgtccactcccacttccattgttgttagctagtcagttttatctcgggagtggttctgtggaagctaatgtatctgatgtgaccatacttttttttacttgcatggcttgggcgaatggcactggtttgatagtctccaaatctggacatgggccactaggccagggacttttatgaaaacccaaaaaaaaccaatcaaatgaatccccttctaatatctcactcaggatataagtaacaaactgtagacctcagaatcacaagggttgtctctaaatacccaacaaaccagccctgtaaggattgcggtagttgcggaagatgccaagctggcgcgctagagccatgcgggccgcgatcaacatcccccattcaacttctccctcccacgaattccgcattggcctcacaaaaagcaagttgagaccaagggcaggatgattctggtaggctgatggaatgacgatcactgccacaaccaccggccacatgtcgccaaacgaggaaccaagcctcgacgccttggatgcgggtgcggaacaattgacatttcgttctcactgttgtgtatgctgacataggagtacatccagtggactacgatccgattgaacacttgaatgccgttttctcccatccatccaccctctcctccgtttctcagattgccgacgccctgaacaaatgcgaagatgagctggacgatgacatcggcatgctggtggaggagcaggtcacctccaatgccggtagcgtggaacgaatccaggcagctaaagacgacctgtcggagctgttcaagaagatcgatgacgtgcgtgagcgcgcattgaagaccgagcaggcaatcaccgaaatgacagccgacatcaagcaattagacaacgcaaagaagaaccttacactatcgatgacggcgcttaagcgcctgcaaatgctgactacggcgtatgaccagctccaagctctcagtcggacgcgacagtatggagaatgtgcacagctactccaagctgtcattcagctcatggcccatttcaagtcgtaccgatcgattgaccaaatcgcaatgctcagtcggaatgtcgcggatatacaacgagacctccaagagcaggtctgtgaggacttcgagctggccttcgccaagggggaggtaggctcgaagcgtgcgatgctcgcggagtcgtgtctagtcgcagatgctctgggtgagcacgcacggtcccgactggtgacttggtattgcaatacacagctccgcgaataccggcaggtcttccggaacaatgaggaggctggatcattggataacatctcccgccgatattcatggttccggcgcatattgaaaatatatgacgaagagaatgcggctatcttcccggcttcgtggagggtaaatgaggtattagccaatgtcttctgcgagggtacacgggatgatttcaagggtatcttatcccgatctgtacgcagcgggcagacgatcgatgtgaatttgctcctctcgtgcttgcaagagacactcgatttcgagcattctcttgagcgccgcttcgccccttcgtcgcgtgtatctgttgatacatttgcctctgccgaaccgcctgtattcaaagagtcaatttccgaagccttcgagccatacctcagtgtctgggtcgaggctcaagacaaacaactcgcagccctactaccgaaataccgccagcaacctctcaaagtaccggacgaggagttcaactcgcatattgtgatttcatcttcgactgagcttttcactttctatcggcacgctttgcaacaatgtgctaagctttcaaccggtggcagtctagcagagctggccaaggtgttcgccaaatatctagaccgatacgcccaggaggtccttctcaattatataagtgaacgaccaacacttcacacgccgtctagggtgccatcggtagaggattacgtctcagtcttgaacactgctgattactgctatacgacttgctcccaactggaagagaagattaggggtagattggatgagaacctgaagcaatccgtggatctgcaaagccaggcggactctttcatgggcattgcgtctgctgcagtacgaggccttgtgcgacaagtcgaagttgatctcgagccctcctggcgcgaaatgcgcaatacaccttggtctaaaattgaggcagtcagtgatcagagctcatatatgggcgagatgctctcccggacgaaggagaaggcaactgggattttacagttgttgcataagcagcaatatgcgcgtgccttctctgatcatctggtggagctcatgtcgagccagttcattagcaatgtcttccaatgcagaccgctttcagaaactggcgcagaacaggtatgatgtcccttcggcgatgtaattgtatatcttactaactccattcatagatgcttctcgattcgtatactctcaaaagcggcctttcatccctgctacctgctccagcgcccgccggctttgtcaagcgtgtgaacagcagcttcttcaaaatcgaaactctcctcaaaaccctccaggtccggccgtcaccaccggaagctcttgtgcaagcatacctcatccacattgctgaccgcaacaacaccaacttccgcaaaatacttgatctcaaaggcatccgcagccgccaagatcaaaatcaccttgtggagctttttaatcttcaccgtgcatcagatcgctatgcatccagccttcaacagagcaacccaatactcgccgctctccaaggaccatctactaccaccaccggttccgtatctcaaggcctaggtctaggcagtgccgccgcggccatgccctctcgttttgacgcctccatgctcggctctgccatcatgtccgctgccaaagacggtgtcgaccgcttcggaaaccccaatctgagtatgggtcctggtgcggctggggctactgggacagctacatctacatctggcgtaaccagcccatcaggcaccttatccccttccctggccagctccagcctacaatcgaatcccatgcacacgccaacagaaagcaccaccggaaatctcaacgagaacctcaagaacattggtaaattcttccgccgcgatctcggcggggttttgggggcgggtgggggggnnnnnnnnnnnnnnnnnnnnnnnnnnnnnnnnnnnnnnnnnnnnnnnnnnnnnnnnnnnnnnnnnnnnnnnnnnnnnnnnnnnnnnnnnnnnnnnnnnnnnnnnnnnnnnnnnnnnnnnnnnnnnnnnnnnnnnnnnnnnnnnnnnnnnnnnnnnnnnnnnnnnnnnnnnnnnnnnnnnncgccacggcgtcgggggttttggcggccggttcgggcggagcaatgaggatggggtgtagcttctccccatctattttcattacgtcttctatttttttctggttctgttttgactcgggcgtggatacaccattgtaaaaatgttctttgccgtttcggtcgatttgtccgagccattgaatgcccgaaggagtagcttgtttatgtatcagagcgccctgtgttgaccttatgttttgcagttgtataccacttggattgaatgcattaaatgcgacatctgtgttatttggatctaatttgtctatattcttctagtacacatatcccctggtgtgggacagtttggttcgaaaatatttattctcttttagtccacgtccttctaatgacatggctctacaaaatataatatctatatctcttctccatagtcacccacaacccctcccttttcctattccaagaaaaccccaactcggcaaaacatgaattccgcaacctcccaaccccggggacataccctccgcacccaccgacatgtaaccctatacgaagaagaacagggctgggcacaaatggaagcactagtatttaaagtggtgcagaattcctcgacaactacgacgcatccacagaccgatgctagatcttcgagcgcaacggcgtttctcggccgtatagtaatatgcaagtcagaaacagactacaagaaatgagatatagatgaaagtcaacaggtgagtttcagctggcctctcacccatttagagttaaatcctctaaaatcttgggtcaaagtcctcaattatagtaggaccctggacggtatgtcttaaacacatgtgaaaaccctgcgccaacctgagcttctgcgtcctcaataaacgcaggagtaagcgtgatacatccagtacatcttacaaaaataatcagacctcaaggatgattcctctttgcgtgtacctgcggtctgctcctccgcctcttcgcgcattcgtaagagatctgcccggtttttgctcataccactcgatatcctctggataattcgttacgcgccctaggaatcgctcaagaacacaagcaacatatgcattctcaaaaacccttcctctttgaggactagcgagtggggtccaataactttagaaatatccacggattcgttccagagcgtttgcgttgtagatcgtgcgggtctataccccgtccgtacctttttatgctttatagccggtggcgtaccggcagagggagtctagaagtagtgggtcgaggatacatagcatcaatttgttactacgtgggctaggcgggcgcgtacatctgcaacccctctctagcgcggttataacagtagggttaacattcgatctataagcgacagagatggcaggtaggaaagaatagcgaaaatgcgataatcaaaacaaattctctgcgtaacgtcccaagattcaaccactggcgaatgaggcgtttgcgccgctggtcgaatagtttgttatgcgagtctagataagcagtatcccattattcctagaaatgggaatcgagttgatagcgcatgaaacattaggagaggagtcacatatactgtatagatgtcgagtggaagagccccctatgcgggaacccgacgttagatataagggggcattgtggcgcatatctacgtcacagaaacggagagagactgactgaagcattggagttatcaagtcctttggcgatgactctggtgggaacaaatgatggccttttccggactgaacctaggtcccagggctggtcaataggttaaagaagggtgtaaattgtaggatagctgtggattctcgaaagacttcttctgtgctgactgtttcaggctgcctcttcgtctccattcagggccttggtgtgtaagagtctttggtacctttcatattttcttaactacatgtgctttcccaccttctaccgaataggacaacaagctataggaatagatatgttcccctcccatcatgatacttctatatgtagtccccggggaggcgcccgaaacagatcgtccaacggggatacctagaggctagaaccctgacaggtttcgccgaagatccggcaggtgggccgggacctggcggacaatgcttgtgacaacaccgtaatgcttgctttattcattttggttcagactggtgaaatagatgttcatacttttctttactcattattcagccttgaaagtattgtattagacgatcaattagaaccaaggctacagggctgtagatataaagaccaaagtatggaacaacattccatggtctcaaccagaggtctccctacgcgtgggtctcttctccaacgacacattattctacttctagcgattttgtgcagagaaggccaccgcgaggagaagattttcctattcgggtcgttttcgttttcgcgagtatcaactgaacccttgatctccacttccttctgctggacaattttattatgtggggccgatttcatctaaatgatcagcatccgaagcaataaccgctttggtgcagattctggagagtctgaaacaccatacaatcaagggaccaatgtacaatgttgtaagcaattgaataggggcgcgtagctcatacattgccttctatataagatgggtagggagctgtcttattctctgtttccagcaataccagcactccatcttcttcacccttccacttctctttttttgccatgtttcccatcgccgttttagcactggttgctaccgcccaggcacacacagtcgcctggaccaaaggcatgtactgctctgggggccctgatctttctaccgtcaacctcaataccaacacagcagtggggcccctttataacctcgccaaggaggactggtggttccaacacgaacgtggatgcgatgcagcaccgccgcaggacggcgaggttctcgaactccctgctggtggaagcttcaccgtcgagctcgcccataaccgggcgcagactacactgtcatacggtggacagtacgcctctgattggccggatggaaaggatcacccagaagactgggcaggtcctggaagtccgccagactgcatccaggatgacggtgcaatgcacaccaacaaccaatccatggctgctggtaccgcgtttgcgatcagctatcagtcagatctagccgatgtcacaatcgacaacttggccgtattcacggtcttggagcagtaagtatctttcaagagatgggtgcgtgaaatgattgaagttctaacctacatcttaagcaccccgtggaaacgtatcgctacctatgaagttccagcggatcttcctgcctgccctgagggtggctgcacctgtgcttggctctgggtaagtggatggatcaagtataccacgatataaactaacgcatttgcaggtgccgaacggctgcggacaacctaacatgcaagtatatgttgtcacagtgtaggattttgactgctaactcgaaaactaggtacatggctggctacaagtgcaatgtgacgggctcaacatcatccaagcaggttgcacctgctcaagtcgcggcttattgcgaaggtgactcgaccaagtgtgtcaagggcgccaagcagatgattgctttcaaccgtaagatatttgaatctttagtcgcactttttttatacagttgactgactcgagcagaacaaaccggaaacaacgttcaagtgcccaatggcaagacaccgatgtacaacacggcctggggttgggaatcaggtatgtgttcattccggacgactcttcagcaatgataaaaagtaatgacaaattcttacatcgacaggtgcccaaaatgatattttcgtgtgatcagggccaggtagtcatagcaagcagcttgttcatgaggtgattgtcacgatccacatggatcgctgggtcatatgcttcatgtttgcttgctcgctcgtttgcttgcttgtttactatatagtctgctggcttgtattccatagattgtttgttagatagccaagcgagaaggttggttgttggcaacgtttgcaaagggacagctatattaactggctgcttcctactttgcaacttgcttcttctttctctctatcttagttattttgaatagaatgcactctgcttcctttgcaagatctggcacgtcacagtggcgaggaaatacaggacggaagatagaagggaaatgaggaatattttataaggatggttgaatgatggacaggcaattaaatatagtgtttacctagtcgaatgcagtacttgatcttgttcttcctatagttcctcggtaatctctatgggagtcgggatacaccagctctatttaagcttaatgaactaaaatatgtcgtatgtcttattcagtacgccacaagactgtatgtacagtgtttacctattatatactaaattccatcaacggcttgaattatttccaaacgtccggatatattgggattctcccgagcccaaagcagggccatgaggctcggaacctcacattaggtaaatgaaaggcagagaagagtacgctgagcccacaccaatgcacccgctttcctcgtaatctagaggatggtcactcttgactacaattacccgggagaagatgaatttgaaggagattctggtgggattggatccctatctgactacgccatgctgaagaacctacttgataggtgttacagacgatgatttacctacccaaagtcccgttcgtattgttgcttctagcctctttggagcgactatatatagcgggggtgtatgtttgccgtgtacatatcctgattgaagtaccaaaaaatcttgtttctgtcttaataaatcgcttccctcaactgaaaatgattggaatcgaaggagactgggatacgccgccaatggataaagagatgtacgacaggacttcagaaattagatgtaccgttccatatccgtcatgtgatatggaagactggcaacgaggaagagaggtagcagacgaggactattgggccaatgaggacaatcttagcaaggagcattcgtctatgtagatcgatagctgggtattgaggctctaagtagcattgttgccgaggtaaggaggaactgtcacgtcacgccacgaacgtggtgtctttcgatttttacccgaatagtccacaggaactcatcgcgccacgatgtagctacgagacagacacaccttcatattacctattgtacactagtcaacataccttccactgaagttcacaggacgaccttgcaagtcccacagaggaccttgaggacttctaaggaagctatctcgtcgcactcccccccctcttctcttcactcttacgacttacacgcacgactaccaacatatctcataccaaacaaaccatccaaaggatgagcaaataaatgcattggaacgaaaacatacaatgtctattcaagggtcatcatcgaggctaacaaaaaaaagcacgaatccatcatggtcacggcgcccctcctagaacttcgtcctagaacgaagctagcatgggcaacatgaacctgttagatccgttcgcaagagccaggcccgcgatcgtggtctcatctcatccatcttcgattcatgactctttcccattgtcagcgcaactccccacacaaaccccggtgcccatggaaaaataaaatgggcgacagacgtgaaaaagcaatggaaaagcaaggatcaaggacccgaaacgtgtatgcaagagggaaaaaaaaaagttggacaaggcgcggagggattggaaacaggattacaggagaaattgggaaatggaatccgagaagacaaagagaaagaaaaaaaagagaaattgatatcttccaggttttcggaggaaacgccattgcaaagcataaagaaaacaaacaggttccccgcgttaaatcggggttaaggagaggggccccttcacatggtatcataagcgaagtcttcatcaatggcctagcatcaacccccatttacggcatggaaattatctccgaaacccttttactgcgaagcgcactgcacccgctcggcaccgccgggcacatcatcttcatcctcgtccatgccggtcgcggccgcgccgtgggcgcgggcctggtcgtgctcgttcgcggggtcctcaagctcgaaatcctcgaccatagcgtcggttgggggcacgatcttctcagagcgaggaggaaggaccttctccaagaggtctaggttctggagctcttccttcttcgggaacttgacatcgaacttgatgtataggttgccgtggtcgtggtggcggaacgagggcataccctggccgtgaataaccttgatggcatctgagaggaattgttagtaacaagtttcacaatatctgtggggaaaagcaaggcaagtcacataccaggaacgataacctcgccagggacaatgttcacggtcaaccaccgctcatcaaggtgttcaatgtggatggcaccgccggcaagggcggtaagcaagtcgatctcagcctggtagaacaggtcgtcgcccttgcgctggaagcgggggtggggcttctgctcaatctcgaaaacgacatcaccgggcatgacaccaggcatctggtcaccctcgccgcggaattcaatcttgtggccgtcccgcacacctttgtcgacgtgaacgtgaagcaccttgcgctcaacgacggttttcttgccgttacacttcttgcagcgatccttatcacggacgatctcgccctcgccgttgcagtcggggcagacggtctggaagcgctggatcatgggacccatctggcgcatcatcgtcttcataccgctaccgttgcagcccgcgcactccttgacagcaccttcctttccgccgcggccatcacagccactgcagatgacggacttctggagcgccaacttggataccttgcccttgtagatgtcctcgaggttcaccttgtgcacgtggtggattgtacgggccttcttagggccttgatcacgcatgccgccgccgaacattccaccgaaggggccgccgccgccgccgccgaagaattgagagaacaaatcctcggcgttcatgccaccgccaccgcctccgtgctccaggccttcctcgccgagctgatcatagatttgacgcttctccgggtcgcaaagagtctcgtaggcgtgcgacagttccttgaacttctctgcggcatcgggattgttggtgttcttgtcttcatgtgacgaaggggtgtcagctgaatgtttcctaaatttgctattggagtctcccgggttgttacataccaggatggtacttgagagcacccttcttataggcagtcttgagctgagcctcagtagcggtgggagcgacctaaatgaaagaaacaccgagtcagatttcaagcacgaatcacaccggtttcgagaaccagccaagtgtagctttgcatgggttaacataccccgagggtgtcgtagaactttgtttccttgaccattgtgaagtatgcgggggatcagaggcgtaagaaagagaatcgatattaggtattcccgttggaatccagaagtgaagcgggagaatagaggggaacaaaggcgaaagtttcagagtgcttttatatgagaaatgccaaacagacaacaattgcggttatttgaagtcctggctggggggagatgaaaaagtggagggaagagaaagggcgagatggtttatctgaacaatagtcgaagccaaaaaaaggctgagtaactttttttacctaggcgtatgagactcgtaagattacccactcaattaccagggcaactaaggattgacggttttccactgcgttttctttgtctcgctttgaggccgattttacagtttttcagtccagaatcgacaatttgctctacaatatgggctattcttcgtctccagctcttctggtggcttctatgtacatcctgaattggcccgagcgctgattctacgggattccgcggtcttcgatggaattcgcaagtcttctccgcgcttccatgttttgttttattacgctgactaacggagtatatttcacgcatcagaggaatgatcgcactccctaccaaatggctgttaaatttggcgatttattggcctcatggcatacacattacatggtttttgcatattgtttcctgcgtgcaatccctgtgtaccagaaactcaacaatgcagaaatctcgaagccctcgccactatcgagctaaaagccacccttcagccacatatatcttatcgataagccaagaggcgagggggaaataaaagctcttcaaggtccactcggttccctcgtcatagaggggttcggaactctccgaccatgccgattatgccttggagtagatttccgtatctcgtagtcttcttatcttgcccctctacttcgtagctcacactcagctcacctactacacactccgaaatggaacaagatcttggattcattgctgccgtcgaagaggcgaagcagggcctctctgagggaggtgtgccaatcggtgctgccctagtctcgaaggatggaaagatcctcggccgtggtcacaatatgcgcgtccaaaagggaagcgctgtcttgcatgtcagtatagcatgatatactgcattgatatcaattgtcgatctatatctatacccaatattacagcgttcatagactaccgctaacacacacaaggccgagatgtctgcccttgaaaactcgggccgtcttcctgcctctgcttacgagggtgctactatgtacaccaccctctcgccctgtgatatgtgtaccggtgcttgtatcctctacaaggtgaagcgcgtcgtcattggtgagaacaagagcttcatgggtggtgaggagcttcttctcaacaagggcaaggaggttgttgtcttggataatgccgagtgcaaggaattgatgaccagcttcatgaaggagaagcctgagctatggtatgttgtgtttggtgctcgatctatcgcaatgcgtaaagcggctgtcggtctgctggcagttgtgtcgaggagtttcggttgtttcatgatcgtcaatactaactgtagtgtctgctatacaggaacgaggatatcgctgtctaatttcataaggcctgcatatatcatagccctaaatacccgagaattgaaattatccacgcccaaaatatgtgtttttagatccaatgtagactttttatctgagtcggggaagaagccgaccgcttttaagattcaagaaaggcacaattatacggtcaaacggtggatttcctcaaagaagaacttgaggttctcggggtcgacgaatggagtgacacctacgttgagagacagttagttagatggcatacagcgccaaatcataaggttcgacttaccgtggcctaagttgcagatccatccctgcttgcccttcttgaaaccctcgaccatgggctcaacagtggcagtaatagcaggaggcccaccgtaaagcatgccaggatccgcattgccttggatagtcacacgaccgttggcaatacgcatggcatcgccggcatcgtgcagccagtccaagccgacaacattatagcccgaatcgcaaaggtcatccagagcgtaccaggcgcccttagcaaaaacggtcataggcacaggctccaagcccatctcctgcagccgcttggggaggttggcggaaatgtggcgcaggtaaggaagcgagaaggacttgaacgagacgggagacagctccccggcccacgagtcaaagacctgcaccagctgcgctccggcagcgacctgaagtgcgagatattccacacatatctcggcaatcttctgcagaagagcctgcgcctcggcagggtacttgtagacccatttcttggactgcacgaagagcttgctgccaccgccttcgaccatgtaacacagcagggtccatggtgcaccacagaagccgatcaggggcacccggcccttcagcttgtgtcgtgtaagggtaattgccttatagacgtagtccagctctgctttaacatccacattcttcgccatcacaatttcgtactgcccgtccgtcggagagtcgagtggcgcggggaaatgaggtcccttcttgtccagcatctccacgaccatgcccatggcctgaggaatgactagaatatcggagaagataattgcggcatcgatgaggccttcataacgctcaacgggctggagggtcaaggttgatgcgatttcgggtgtgcggcagcattcgaagaagtcacggccgcccttggcctcatggtattcggggaggtatcggccagctgttcaatagaaaaagaaatttcaatcaagtgtccttgggaacgtagtgcacgaataagtctaactcaccctgtcgcataacccatatcggaggacgctccaccttctcacctacgatttgtcagctccggccaaaactaagatacagagtaaacataccccgtgcagccctcagcagcaggtcgtttttcaaaggctcaaattgttcctgcattgtgttggtgggatatgcaagtgcgatggaggggggaagtgggattataagaaggttctccgggtaccgcggcccgtgattatcggaaaacatagtgacaacgctttatacccgtagcatcataagttcgttttcttcccgaggtctgtttttgcccaaaaaaaaaaagagagagagaaatgggctatacatgggtattttcatgtttattcgaatataactggaatccgagttatcacatccatgaacatatttgtgtgtttcgccattggtcatcaccggtacaacttgtttcacagaggttgatctatccacccttctatatcaatatatcaattaggacgttaccccaagataccctgttgccggtcactacgatcatagtatgacagtcctatggttactccgtagctcacaggtcaggccactggagctctcgggagcttgaagacgctctagcctgtttctaaccaccataagtattgctgagaaccatgactggagttcgattagacaggaccttttgtgggatatcttcggtagatctaggctattacgataaattattgatgtcgcagccctcgggccatcctctcagggtgcactctgacttactatttaccttgatgtgggaatggtagatataaaagcaatcatatctccccttgctgaccgaatagccttcctaagagaagattagatctctcgcatcttaggacctcttttgaccacacagtcgaggcaccactcattcgtaatggctattctttgttgcataccctaatcaatctaatcaagatataaacccaaagaccagggtcaatctcagcaatatcctatatgacaccctctcatgcggacttgtcaacctatatcttgctaaagacagtcaaaacgaagatggtatgtgtgaaaagatactagaaatatatattttgatctaggtgaagtgaattttgcggccatgcttcccctcccctcctttggacataatggagattgcttgctgcattacatatgtttttagaaatctaactgatcatttgctgtacattcataaaaagcatgctttcattcgtcgtaatcacctctcttccgcaggttgcccaagttgtacattgaatcattgagctctttctgctctttctgctctattatcgtaggcagacttgaggtgccttcggagttgattttgataaccatcgagtcctctacaggaatccactttccagaatcaagccggaatgtttcgagaagaggctgggaagacgacttccaagcacatgtcgaatcggattggcgcaaagtatccacggcaacaataatagagcctcttgaatcaataccgaccagttcaagaacgtttcctgacagctgaagtgtatcttggtgagttatcgtgttgtcactttcgagagtgtagcaaagaagttttgaagacctgctctcgacgttaggacaaatatagatatcatcaatggttgttagaacgtacccatcaagtgcaacaaagatagccttcacagaatcggaattgcctgccgtagacgcaagggaaacatcccaaatgccgcgcaccgtagtctctccctccgacccaggaagctgaattttttgtaaaatctggttttcgagccagtcccacacaagcagatagttgtcgccaccacccgagatgagaactttaggttcgaaggaagggacgcaaagactgctgacaaatgaagtgtggccaaagcagaattgctcaattacatgcgcttggggaacaccacgagagacacggatgtgctcatcgcgatctccagtcaggatgtaactccgcttgccaacggccgagtctgcaggccgggtcacagagattaattccgtcaacaacgaaacgtgaccaatgatgacttgatgctcgaagttcagcacagcccgttctgcttggttggtcttcgacagagcagcctgtcgcatttgttgctccaatgattcaaggttgcgttttgtgtgcaccgtgaggtttgtggcagctggctcatacggcttcgctggagcctggaccttcacgtactctccgctcggaatgagtgggaaagtgtacacatctccgaatttgtcacccgtcaagatgttgttctcatcgggagtcagggtaagtgcagaaagcttcttgggcattgtactatatatgatgagtttggcgaacctgcagatagaaaaacagccactcaccgagcactcaattgttggagtttgccttcgttatccaaactcaggactcggacacatttgtcctcagaggtcatgatcactacatatttgccgtgggcaacagtcaagagaggaatattggtccaggagttggaagcgtccttgtccgaattcttaggatttgactccaatttggcatccttctgttcctcggagggtgaagacagcttccttcgcttttctcggggaccttggctttcagatgcgggagccgcgtcagagcttttatcatccgcattcgcatctacggattgaggccacacatccaggcgctgaccactagatgcatcgtaagagtagagattgcgtccagcggtggcaataagaatatccgattggcctgctgactgcctgttgacatatcgcagacactggaatgggtgttggagaccggccatgatgaagtctttgattcacagagtgaaaatgatcaacgatctcacaaataaaccaattgcgtactactaattgtagtcaagaagacaacaaataacagtaatcgctcccgagattcctctgatcgaattccggccatgtctgtccatcatgggcgggtctactttcggaaccacgtgacccactagcgagcgcaccaccaaaattgattcccccgaaccgcacacctcttctttttttctcttccattaaccaccacaacaatagactttcccttaaacaacctatcttcactgaaatcaagaagaaatggggggcaagtccgcaaccaagtctgcttactttgagaagctgcgtgctctgttagtttctcaatggcgcctagcaattgactccattcaaaaattctaacaatcttctgttatagtctcaatgagtacagcaccatcttcatcgtgggagttgacaatgtcagctctcagcagatgcacgagatccgtatcgctctccgtggagaggccgtcgtcctgatgggtaagaacaccatggttcgtcgtgccctcaagggtttcgtcactgagaaccccgagtgggagcgtctgcttccccacgtccgtggcaacgttggtttcatcttcaccaacggtgacctcaagtctatcaagactaagattcttgccaaccgtgtcgctgctcccgctcgtgctggtgccgtcgcccccgatgatgtgtggatccccgctggtaacactggtatggagcccggtaagaccgccttcttccaggctctcggtgtccccaccaagattgcccgtggtaccattgagattgtttccgacctcaagctcgttgaggctggcaacaaggtcggtgcctccgaggctaccctccttaacctgttgaacatctctccgttcacctacggtatgaccatcgcccaggtctacgagaacggtcagtgcttcggcgctgaggttcttgacatcaccgatgagcagctcttggccgccttctcccaggctatcgctaccatcaccgctgtctccctggctgccaactaccccaccctgccttccgttatccactctctcatcaacggatacaagaaggtcctcgctgtcgccgtcagcaccgactacagctggcccgagattgatgatctcaaggaccgcatcgccaaccccgatgcgtacgcctctgctgcgcctgtcgccgctgccgccgccacctccggcggtgacgcccctgccgccgcagctcctgctgaggatgaagaggagtccgatgaggacatgggcttcggtctcttcgactaagcgccctctcgacgggatgcggatgccatgtattagatttacttgaactggcgcttgaaatagcgaccaggaatgaaaaaaacatgtcttggcaatggatttccctcggaaacctaggactcgtatgatggacgtagctacgcccattgttcgtttccacggaattggtgagttttcaatcccccaccccctttttgctcctaccccttgcacacccaccacctcatatcaccctggcggatgattataaatttttaaccccgagcatttacgcccccctccggggcgctctgaagattaaattaatgcaacaacaacactctaattttttgatgacgccatgcctttaccctcacacatgcttttgacttttaacacatttcactgaatttgcaaacaattgctaactcgtgacaagattacagacgctctccatacgacctgcgatagtagtaccgatatgttgtcgccgtagacaattgtgtagttgggtggctgtcggaaatcctgttcgctatctctatttgtgcagctgccgtaatagatggttgctcaatgaaaaatcgttctctcttcgaacttattgttcctgttcgtaatggtagccaccagcgtgtaactggttaacagtacaacataggattacgcatattttgtctagcaactccatatgaaaggtacataaatccaacgtgcataacgtcgatatttcactctccaactagacactccgtactccgtggtggatgggaaatgtgatcgatccacttgattatgagacactctaatagcccaacttaccctcgatcgatcaaacggcattccgatcgctgctgccccggatcggtcgattcccgcggtggatgcggataatgtattaaaatgaccttgtaggaaagggaaatcccatcacggtctctatttctcagagacgagatccaatgactggaatgagaggtcatggcgaggtctcagtaaggcatacggctcgtaaactacatgcggtctttcgcttgctttgagaactatgccccttcttcctcgccccgctgagtgaagccgtccgctgaaaaacagatcctttcaatgcaagttctagcgtggctgtactagaggacgcctgggacatggcagaaaagtggatagagcgcgggctcgttctcaacggcttgccattgggagttgctgggaattacggtgtaaaggcggccgtttctagcgccagaagctgttcttttcggtgtcattttcgacaggtcttaagttttatattagtgaatttccttttcgcgttagctttgccttttggggcttagcgtcctcgtaacctcccgacctcgggaggtccccgctgatataacccgctctttgttgcccaggtgcctaatatcggctttgttagaatctgcaggaagtgagacaaccttgaacaaagaacaggagccacctcatactgctaactccaagaggaaatgacaggagaagagttcccccaggcaacctgcgacagcctgagcaattacgcgcccaatctgacctagatagcctggagcgaagagctgaagaaagagacgcctgtaatacaagagcacttcaaaatcttttgatattatatggaggcacaagctatttattcgaactctgagcatgtcccaaaataacctcgtgctttgacagacgagatatcttaacagaccaggtagtgtagcaaaaaaaaaaaaaacaattttcgcatccacaagttacgtccgctccatccactgctgcagaacatcagcaacttgcaaactatttttctccatgaacaccaaatgtccatttccatggatgccgatatccgccagctggagatgttgcgccgggacacctgcctgttgcagaaaccggactgtgcaccagtcatacggcgcgtggtaagacgattcggtcgtcaggaccaggacgggcacatgggcaagattgacgagctgtctcggtgcgggggaatcggcctggattacgcagtcggaatacagcgacgagttggaagggataacatgcttcacgaggtcgaccggatcggccacggcgggcgaataggttagggggatgtcagtaagcccgtaggcgcgcgtggaggagttgctgaagatggcgtcctggaacggagggccggtgggttcgatcgagacgatggagtgaacgagatccgggcgcacatccgcaatgagccagggcatacatccgccctgggaatgggagaggaggatgactggggatccgatggtgtcaagcagggcggcgccggcggcctggacggtcgactgctggtaggttgctgaattgaggaattcgactgtcgaggaatagtaagtgtcgaaattccggtcgcccatgacgcccgtcccgttccattgggtgtgcagggacgcttgcggccagaggttgtatagcttcggtgcggtaaagcgctgctgcaacacctcggcactgtaggtgctcagcgttccattgccagggaaccaggcactgcggccgcggaaggtttgatcgatgatatagcatgcatatccctgagagagaaagtaagacgcccagccttcccctccatctggcttgttgagccaattctgccaacatcacggttaacctctaggaagggagagaatggttcaatgatacgtacggtgcctgtttgagcttgtccatggatgaagacaattggatacggcttggtaacacccgcggccggtgtcagtttttccacgtacatctgatccgcaaagatatgttggccagcatcattcagaatatattgtcctccaacatacatgtacgatcgctgggctggcacctcaccgcaccagcctgaagccgcgacaattgcccagatcaataataatcctgtcttgatatgcattttaaggggatggccaggggtcaacgaaacgacaaggatcatcagtcaatttatttaccggatttcctccgcggtcggccttcttgttggcccccacacgggaactacatactaacggagagatggggagttcactagttagaagctaggaaatatctccgtaaatggatcctgaatccttcgatcttggaatttcttttatgagtaatgcttggaaaatggttgggaagtgctcccttatgaggaagtttctgtctcttctttccctcttgcttacttcggacttccagaggcttcaaaggccatggattctaccctcatcattctttgggtatttacctgggtggcaattggcttaattgtccttcggctgttagcgcggaagttgagaggataccagttcgtcctaggcgattatttcgcaatgggagcgattctctgtgctgtcatacgcctcgccttggttcatgttattctcatctggggaaccaacaatatgtctggcacattcagacgcacgcacgtttttacccccgaggacattcgtcgtagagagatcgcgagcaaattcgtgctcaccaatcgagtgttctataattcatagtacgtgcgttaaacggaatccaaggtcggctatttctctttctcatatttcttttagtctctggttgcaaaagttggttctgcttgatacctatcgcagactgctcaggcaacttcgctgggagaaggtcacgatgatctcctatattggtatattcgcagcgacgtatgtaaccgtacagactgtgactttcacggagtgtgatccattcagtcattactggatcgtattaccggatcctggtatttctttccctcttctaatttctctcttattttcgtgtttcgttgaaccttctaaccaatacaggcaaatgctgccaggcacagctccaattgatcgtcctcggtatgcttccagtcggaaagatcggttcaatgtaatacctctaacattctagtttcctcaggtgtattgaatgtcatcaccgatattatgcttatcgccttgccgattccaatcctggttctggttaaacgatccgctgttgagtaagtctacccatatcaccatatgaatttcgttgacgagctctctccgctagaaaaatccagctagcggtcctcttcgccgtcggtctcttcatcgtcgcaatcaccatcgttagactacctcaaaacgtcaaaaatcccactgtacaagtgaacagaacgacttgggcatccgtcgagttgctcgctgccgctatcgtagccaacgctccggttctgtacggacttctgaagggacggagccaaaggtccaagtacgccgcatcaggagccggatcaactgggccgtcgtggcagggacttcaaaagaggtcggcaaacgagctcgaattagaactgcaacggatcagtcacagtgtgggagggcctgttctcggttcaaagatatcatccagccattatttggagatcgatggcgggagtagtcagtcgttgactcgaagcctagataagtagggaaaaactcgtacggagtataacagaaagggcttcaagccgagctaaacgtgggctttatagtcattcggtttattcggaattgtccagtgtagcactagatgcccaatattattgctgatccccttttggccctgtcccaaaggtaagattcggtggtctcctaggtacggagtgcgctatgtcagcgactttcaatataagcatgtagacatgttgcgtatcgaattatctgtcaatcccccctattaggaaatgacaaaagcgtaaattttacttctagacaatttgccatttgcaacatccttttaacgtgtggtcacctgtatcaatcatgctaagacccgctaagctaggaaaactttcccctctgctctctgcgttcccttctctctaagcctcgcaccgtaggtccatatgagaaaaggcgctagcaaaccgaagccaatcatgatgaacgccaatgtgctatttccccatccgtattcaagacgatcatatagagccggcgcgaatatagggaagcaaaaacccaagatacttcgcaagaattgactagaggcattcgctgacgccacgtattccctgtaggactctataacatactgctgtatggcttgattactgagaatcactccacagccaaacaccgatgctccaatgccgacgacgattcacggagccattgcttccgctgtccagccataccatgatagaccagctattaggaaaacaatccctgggaaaatcaagggaattcgatattcaggtgccgtctgtcctcgcttgtgtgtcagatacttccagagccagtcggtgactcgagcgccaccaggagagccgacagtatagccgagaacaatagcgacataatgaacgccactgatcaacaccgattgatgatatctctttgtccagagggaggcaaagctggtgaggacaaagaagagaacgccataattgtaggcgatgaagatcgccatgatttgaatagttgactgagtcgccatcatccaacacgggcgcgcgagactatagcagagcttccttgccagtggttgattgtgaacatcggtcttgatatgaaaaaggcctgcttgtctccttttgtaatttgatggcctttcgatgaagcaacaaacgatgataagtttccggaaagaaaaaaatcgcatagataaccaaagcagcatcgaagatggaaacaacccagaaaagccacctccatccgatttttgtcgtgatgataccgccgaggatagggccaatagccggacccaacaaggcacgaaagttgcgatcgcataagaatgaccgcgctgctccggacgccaacagtctgccagcaccagcgctgtggttgcaaactctgtaccggctcccaggccactcagaatccgcccagccagtaaaaggcccctggtgtgagcaaaggcgcaaatatgttccacagtatataccaggtcgaagacaagatccatacccatcgatgaccgaacacttcggccaagagagcgagaaccatcggtccaaaggcaaaaacaagcacgaaaatcgagaccaccatgttggcttcgctctcactgatgccgaggccgtcaccaatattgttcaaggcgggtgccagcatggatgcactgataaggatcaccatgccccccatggagcacagcaaagtgatggcccatcgcttggacagggaccaattgaattgacatgcaggatcgcctggacccttccattctaccagtaattcgtcgcttgcaggatcgggatcgatatgtatccgtacttcgctcagctcggatgtacttggtttttccatttcatttatatgatcaatatgataatagatgcaatgaaaagcaaatcgttactatctacgaaaatacagaagacggggaaagcaacagttgatactgatttacactacggagtacctggccaggcttggttacaacgaacaaagaatagtcttccaaaagtgcaggggttagcagtcattcacgttgcttccggatcatctattgtccaaatgaaagagacacctgatctaacttatctaatctgatctagaaattgggcctcgaaactaactgttgaggtgcaatagctgcctgatgcatccctgctaggtccctgtcgtcaatcgaatatgattcgcccaagtatctttgccattactagcaaaacatcgaagcttactgaacacaccgtaaaagattcttattttgattgtttccttacagttggatgtgtgagtaaagacccgcgaagagatactattgttgctacttttcgaaggacggttcaggaggtttaagatacggccggaatcatgtcggccctcctctcgaacatgatggtttgctgggccttcgggatttcaaatactggatttagacatgattctgaacaaacatttggacggatattgtgttggaagagagctaggccgaatgccttaatattttggcgctagagctctggcgaaaggaatcgactatagccttcttactgattgttctctgggatttcaatcaatttgaaacggttaagccaacccaatgatcactatttcctctaaatcagtatctaccgtttaactgttccatttggagctctgactagccatcgaaattaatttcgctctgtaacataaatgcagataaagattctataccatgtgcttttgctagatgagaaaccttgctgccattgcacactccctcgctacggtgacggtatgtatgtccatggggcatccagttgatcttcgatgtcttcaatgcgcagttatttgggccaaatgagaatctcacgtaagtcttcattgcatcacgtgccttctgtgtacccattaaaagatctatcgttccctctacgctttccgagtgttttcgatagcctcttcagttcataattatttaactaggcaataagtcctcagttatcaagtcttcaaaatggcccaaaatgaggatatcaacccacgcccattcaacccccgcccattctgtcccgatcccctagtcatcgagcctcagcaacgtattaagcagcttagagaatacctggaagatccggctcccaaaatgcaacgccacagaactaacattcaaggactcatccgaatgtatgagactggggaactcgggccccttgtctttcctggtcaggagacgatctggatctgtgaggggaagatcatggatccgccgcctcgccttgatgaccttgcgcacattattccacattatgccgtatgggccgaggacagtctctaccttctacctttgctacattttaataattcctaaccattcatctagggattatatcaacagttgatgcagcagattcctccccagataactaccttgaaatagtgatcgaaatagtgatgtggtatagtggcctaggattgatctgaaccagagggatgagtctccgtggcgcactggaactactatatctcgttgattatcgttgtcagtgcagtcctacataattagtcaaagtttacgatggttgccttcgaagagaacctcgcagtaggaagtaactcatgtaagactatcagggtgaatatataatctggaagcaatcctaacaaacatcgcttggccacatggaattaattgattaatcacaacggtgctattaggttactaagataccatattggaagcattcagttcgcctttaccaacttgataataaaagagccctacacaaggtggagtcacagtgcagacctactggctgaattccattttaccagaaacagctccagtgcactgaacatttccattgtaatacagcaaaggaaccttcgaagttcaagttcctctcagagcatcgccactgtaacagagtctaggaacaagaaggctctctcatgatatgcctgagatagcgtccgattgtaccttcttgtctcttttcggcacattttcatgtatacctgtgtaggtgcaaaaccaacgtctagggcaacgtataccttctgacctgatagaagaagtgaccggaaaactggagttgcaacgtagcccacgcgtggtatgaaggtgaccgccgtactcgtacttatgtgttggttccgtcacaacttccgtggatgtatagagaactcgattgtcgtgttcgaacgataatttgagcatctccctggatctagaacgggatgactaacctcaatcctaattcgtgtgttaggggtaggggaagcgttaataacagcgagcttcgcggatgcttgcgcggatgcgtaaaaccggggctccgagcccgtccgtgatcgttctcgggagcttctaatattttcaatcttgtcataactccgttccctcttcgtcttgcggaaagtagagctcgacacgtccaagaggaagggccctagctcacgcttgggcgctaagcgtaacggaactgaaattgttaggttcatgttcggtatgatgagggtaggaaacaaaaggataatggagggcagagcacgggatctgaggatgagtgacaagatattacttactcgaccatatgctgtagatattcaagctaggacaaataagtgcatgcctttgttgcttatacttgggtactcaggcgtatgaatcaacttcttccacttgtaagtataactcagaaccgcgttgccttcccggaacatagacctataatctctctaactgtacaggggttgagaaaaatacgacacagtcacacagacaaaagggagatgagaaaagacccttactatggcgtgctcggaataaatctccaaaaaaaaggggactcggggaccaggaatacggaatcccgagcgagaataaacgaggctatgttggcaagggcgagaaataaacgcaacaggaaatttgaagtcccacaatttaaccaaccgaatcactagtcaatataggtatatgacaaagttctcgtataaaacaagccaaacgcctcccgtctaggcaagacgaggctgaaatcgaagggcatctccgaggagaaggacaagaataatgtacgatgtacttcgtgtcgcggagacccttattcccatgaggacggttatgccaccataaccatgtcttagagtcagctggctcagatgaacggcacaacgccacattatttcctttttgcctcttcctctcggctgtttcttctcttgtaagcctctattatatccacaagtcttggatatgcgcctatgtaacccgtagcggcaggaatgtcttgcgtgatatggtcgaaagtgccaagggacgcactaggaagacttagcaagcaaccaaggtggaaaaggtaaacagaaatagttgatacgtctgctagtcttgtggcaccatgttttaagttaagggcgcatctctaagaggtattactccgtacggagcactgctttagtactttattatttacaatatcccgctagatgcgggccgacgagaaagctcgatgacgtgatttagatcttgattgcgcctttacaaagtggatgaaaagtctgcaggtgacagggggaaaagacctgcatattctaggtaagcattgagctatgccctcaaatcttggccgttggagagtcgtagctatgttgtatggcttcgtgtcgagggtttctctactgggctgacaaggttctgggaaagctggtcgcttacggagtagaaattgcgtgactacctccgtatgcaaagaggcaatggcctacggagtactccgtaaattttgtgtgcatgctcccctacatccggagtatgcacctaacagatagagtagcgccgagcccaaacgggaccccacgcgacacctttgactcaaatggattaaagatgaatggactactccgtaacgggtggaagggacgcggcagatgagcaatataaattagatcccgaggtccgtgtggagctgtaggcatattgctcccgaggtcttgccattagaaaaccaccgttgaagctatacacttatgtaaacatgatattcaaggcggtggccccgggctggaataaagttaatcagctaagaagattcttgaaacaccagaaaacccgccggagaacgtaccaccaaagcgtggaacctcctttgtgcctttcaccatctcttctccagattgcgtgttctaaacggtgtgtgattggtctttgggtcccactcgttgatcttcttggcgcaaacctcatcaggacgcgttgccattcgtcacccagaaccccttggcactaccgacagcttgtccggtttagtcctcggacgtttatattcgtcaaggttatgatgacatggactcccaggcgaggcgaatatcatgagaacaatgaatattccaagggcgatgcgtgatagtgcttaaaacaaccagcacataaaattcaagtatcccgcctcatctcgaccacggactgcatgcaaaaaaaacggatatactccacgacccgtcgtcatttctaccagaccgagtgggacctgcggatgtgcgagatcgtcggtggacccggctgccgcgtgaaattcgtggtttttaacaacgtgggctcgctttcagccaggttttgctttttcttgtgaattttctacctcaaacttgcacttgatacaagtctagccctcgtctaatccttgcatcccttgccggaagtccaacccaagcgagccaagcggaaaatttcaaatcttaatttgaatctggggagctcagatattgcgccatttgggatcgaatcacgcatccaaccttgtttttattttctttattctttattctctattccttattgtcgtgccatggaaagtgcatgatcgtctgatttgacattttctttttatactcttgatcgtcaccacatctctagggtttccatcttttcaagtcaccgctgccaacacacatagcggtcctggaagcgtcgtcaaatcccggcatttgatattgtcaactccggtctgtacaagcgtgaccatgtttgaaaaatggagcgaggccaataccaatattggccattccctggccaaggtcctcggtatcaagctcgcatatagagaccccctgggtgctaccggtgccggtgagaccgtcacaagaggagaatcggcattttctatgggcaccgtcgacacatactcatacaacgagcccgagccgacaagcatcgactgggttcgcgaggtcaccccgtccggagcccagatagccagatatttcctccatctgttccctttcctcacatggattaccaactacaacctacaatggctgttcggtgatctggttgccggtatcaccgttggagcggtcgtggtgccacaaggtatggcctatgctgaactggctggactgccggtacaattcggtctctactcctcgttcatgggagttctgatctattggttctttgctacgtcaaaggatattactattggggtgggtgatactgcgcccggtcgaaaccaaaataaaacattgctaacctcatctcatagcccgtggccgtcatgtcaactcttaccggaacgatcgtggccaaggtccaggtagaatacccagattacccggcccatttgattgcatcggcccttgctgtcatttgcggtggtattgttctagctttgggtctcctgcgcatcggattcattgttgatttcattcctctccccgctatttcggccttcatgaccggctcggctctgaacatttgctccggacaggttccgaccatgttgggcgagacggccaaatttagtacgcgcggtgccacctacatgatcattatcaacaccctcaaatacctccccacttcgacattggatgctgctatgggtgtcactgcctgtgcaatgctgtacatcatccgttcaggatgcacttacgccgcgaaaaagcagcctgctaaggccaagatgtggttctttatctcgactcttcggaccgtgtttgtgatcttgttctacactatgattagtgccgccacgaacctgcaccggagggataaaccagcgttcaagatccttgggacagtccctcgaggattccaacaggccgccgtgcccactatggatcgtaagatcatttcagccttcgctggcgaacttccagctgcggtcatcgttcttctgattgagcacattgccatttccaagtccttcggccgagttaacaactacactatcgatccttctcaagagtttgtggccattggtgtgagtaaccttctcggacctttcctcggcggttaccccgccactgggtctttctcccgaacagctatcaagtctaaagctggagtgcggacaccccttgctggtgtcattaccgcgatcgtggtgctcttggctatctatgccctgcccgctgtcttcttctacatccctaaggcttctctggctggtgtcattatccacgctgtcggcgatctgatcactcccccgaacaccgtttaccagttctggcgcgtgtctccgcttgatgcgcttattttcttcattggtgtctttgtcactgtgttcacttccattgaaaatggcatctactgcacagtctgtgtgtcggttgcagtcctgcttttccgtgtggccaaggcccgcggtcagttcctaggccgcgtcactatccactccgttgtcggagatcacctgttggatggcgatggaaagtacggatcattcggaactaacaagactccctccgacgatgaagaccgccaccgccgaactatcttccttcccatcaaccacaccgatggctccaacccggatatcgaagtggagcagccccttccgggtatcttcatctaccgctttgccgaaggcttcaactatcctaacgccaaccactacaccgattccctggtttcaaccatcttcaagaacacccgccgaacgaacccgcacgcctatcggactcgcggtgagcgcccctggaatgacgctggtccccgccgcggcaaggaaggcagcgacgacgactcacacttgccccttctccaagccgtcattctggatttctcatctgtgaacaatgtcgacgtaacctcaatccagaacctgatcgacgtacgcaatcagctagatatgtacgcctccccccgcaccgtgcaatggcatttcgcacacatcaacaaccgctggacaaagcgcggcctggctgccgcaggcttcggttacccgacacccgtcgctagtgacggcggcttccaccggtggaaacccattttcagtgtggccgagatcgaaggcagcgcctctgccgctgcctgcgccgaaatgattgccaaccagtcccacaacaaggctacagatatcgaatccggcctcaagtccgataccaacacaactgcacgtgagactgacggcatcgagaccgcatccgagagctccgaggtcatccgcgaggacaagttccatcgtgatatcacagacagcaaggcgtaccagcgtcgtcctaaggttgcgctcgtgcagggcatgaaccggcctttcttccatatagacttgaccagcgctcttcaaagcgctgttgctaattcttcggacgtgattccacacattgagtgattttttctttctacgtttcatttgctcttcgatttgcacggcatctcttttgctacccttttgcatcgattcaattgttcctctctggcttggagtccgatctgatataccccgatttgacctgttaatatgatgttgatgtttttattttcccattttcccctctgtactttttgtcacttagcactggctatattggatgtatttcatggcgttgaccgtgaacaacctgttgttgtggtatattctttcagcactattcccttgattcgtgtgggttgatttgattgatatgggtcttgtttattggcccttttgcatctgggaagaaacggatttttttgcgatggacatggttcctacttgatttcttcttaaggagatacataccctttctgatacctatatctgatagacctgcttggtgaatacatgtatattccacctcatcgcttgaacatagcctgtgtagtctcttgcctcacacccccaccctccgcgtaaccaaccatcaacaaatcagccttctgatctgtccgaatgccagagatctgattcataactcttccaagtctagccgcgcaatcctaattgacctgatcacatatggctccccattgctggatttatcctcgatgctgctggtggggagaataagaggattacaggctactgtccggctattgtccatgctggtgcaatggcttctgttgcttctatcattcggctgaagactgataagcaacttcttacgaagctttaggccaggtgggtaggagttatgggttggagaaatccaatattgtaggataccgccctgtaaaataatattgctcaaatagagaaatatatagagaaaagacgagttcacaacaagcgaggcatatacatagatggccgaggttcaactgggccccatagttcaagtactgcgaagtacgccgcatccaccagaacgtcaacctcaagtctttttcttctattcggatctcatttcccttctccagagatctgttcgaagtccttcaattcaaaatgactctgaaaccggtcaattgcctgagacgcccagcactacactgcagaaacctagcctttcctctacgccaatcaccaattaaaacatgcgcgcaatatagctctcactcaccaatgggctcaacaaccaccagcacacgcaaaaaagtaacaatccaaaccatccaaaacctctacaaaaagaacgaacccatcacagtccttacagcatccgacttccccagtggccatgtcgcggacacagccggaatggagatcgtgctcgtaggcgacagcctcgcaatggtcgcaatgggcatggaagacacaaacgaagtaacaatggacgagatgctcctccactgccgcagcgtaaaccgtgctgtcaggagcgccttcacagtaagtatatccatgcatacatatacaatgcctacgcccggccaagttaccacatctcacaactcgctatagatcgcagacctaccaatgggctcatacgaaaccaccccagaaaaggcacttacatccgcaatccggatggtgaaagaaggcgggatgaagggcgtgaaactcgaaggcggggcggagatggcgtctacgatccgcaagatctcacaagcggggatccccgtcatggcgcacatcgggctaacgccgcagcggcagcactcgctgggcgggttccgagtccaaggcaagtcagccgcgggcgctgtgaaactgctgcgggatgcattggctgtgcagaaagccggtgcttgtatggttcttattgaggctgtgccgcctgagattgcgggtattgttacgcggcgactgagcgtgccgactattgggattgggtctgggaatgggtgttctggacaggtgcttgtgcaggttgatatgttagggaatttcccggaggggaggttcttgccgaagtttgttaagacgtatgcggatgtttggggggaggcgaggagggggattgaggcttatagggaggaggttaagagtagggcttttccttcggtagagtatacctatggtgtttctaaggaggtgttagaggagtttgagaaggttgttgatgaggttgcggagaatgaggagtaataaaccagcactcggtgtatttttgggtcttcagctgcttttcaaaacaatctgtacatgtgctgaagactttggactatagtcttggccttcaatatctgcccatcagaggtgatggcaatgtattgtttcaagtcggttttccgcatgctttaggaggcaaaagcaatggaagacaaaagtctccaagtatgaattaaaagcatagaacaattcaattcgtacagagcatatacagcccccataaacatcacccaatcaaatccacccgcagctttatccaagatcctagaagctgatactcttttcacctcaaaacacccccaacaccagcccacccaagaacaaacccgctaagcgcctcactcataacaccgccaccaaaccaaacatcccgccaagcgcccttgcggataatcttcctcggaccagccttgccagcaagctgcatgtgcacagccttgctcttctcattcatttcaataacaccctcgatctccccaggggtactacccgggaagaacgagccggcacctgcaccaccggagcggtgaatcagaaccgcatggaagagccctgataccaggatcgtgccgaggaagtagaaggcgaatccgtagcctgattggagggctagaatcccggcggacaggccgaggaggaaggaggttaggctgtggagggaggagaggacctatttcccgggttgttagttgggtgtaacatctaaaatggaggatacagatgcggtctgatattggtgtaggggatatgatatgcatgtggtgcgggataggggcggttgggtgggatgtgggatagtcatacgcggttgttgtgctggacggcctcaggtacgagaggggtgattagcagggagagttcctgctttgtgggtgccattttggctggtttggtgtctttttattcgccgatttgttgtagttgatgtctggattgagaggttgagctatggctctcggtgttcgttgcgggtagtgatcacgtcttgagcgaaagtttgctgagcttgactaagatcacaggccttctgctctccaatagtgatgaaattgttgcaccgggaaatagacttgtgaaggggtggtcacagcagctctcggcttgaactgatggaggtcggaagtggcagtgagtttctagaagtgcacggaccacatggtctttttattcagatgcttcagacgagtacggagtacggagtatgtactaactacactacattcaacagcataactaattaagaaagtatttaacgtaaatcaaatcactcatgttcatatctactattaaccacccaatccaatgttcaataatgccgagcctttctcatgaatccgttcacatcacagcgtttgatacattccgaatccccatgtccttgattatgctgcaaacatagcagaaagaaaatgccagttccatgatgtcgctgacttaaattcaaatatcacattaaaccagattttcgaatttaccatcgacacgggcctccttgacctgctcaaagacctgatggaaaaacgttagtggctgatcagaatcaaataacaagcaacgcttacctttagcattttgttacgtgcacccaaagcattgacaccgcgatcttccagggccttatcatccaggtcgaccagttccgtccattgcaggtccttcaggttgtcggtatacttatgcagcctgagggaccgcagccagctggggatatccttcagaagagccgggtctgtggggtcctcaggcggctttgagctgcctcggcgaccccgcggagagcggcctcgtgtaacctccgagtggtctgacaggtagccttcactaccaagaccaaactgcccaatgttcagagagccgaggccattacccataagagggttgttgggatcataagcggccaaaaatccattgttctgcggtgacgtgaagcccatcggggtcaagccaccaccgtgcatagcaatgccgggcgatgttgggcgagaccgtctaccggccatggccgcctgttgttgggcctgcagggctgccagctgctgattgttgagaagctgaccggccatcaagtgctgtccacccaggcctgggctagccaagccctgggagagaatcgggtttccatgcgagttcttgccctggccatcattggagcgagcacggcggtacttgcgcgcgtcatccagagcaatgcggttgtttaccgtcgacaaagctgccagcttcattgccgtggcattagccaccatatctgcgtgggtgttggagttctggtgcgattgctgaccgaaagtcgcagtcatcggagtgttagtcattgacgcccagctgtggttgcccacattgtatggcgaaagcaaagggggctctatgtcgggggcgggaatattggcagtctgaggcagaggggagcgcatgcccgagggctggctgaactggcccataggctggtgtccggaggatgacttgggccgggcgatcggaggctgcgtgtctgaaacaccacgctgagcccacggagagccaggctgttgacccaggccgtcgggattgttgtcaggcgccgagatggtgggggccacgaaagaggcacgatcgaagactgcgctattgcggtttgatggaggtgcattgccagtttgctgggtgaattcggccttcttcttcgcaatggccgcagcagcatccgggaacatcgcattgatggtagaagggtcgaggacagagttgcgcttcgcgccaggggatggcgggggtcgtccgagggagttccgggaggtgtccatattaagcttcgacatagcgtcgctcagacgactagacatggcatctacacgacgaaaagtaggttagttacatctcaaaaggtagtgtgggcaatttgtcatacccttttcgccaaaattggcaggggagagcaggccggacatcgggtgaccctgagacatttgctgcaggacctgaatgaaaaaccggatctgcacctgggtggtctgctgcagcaaggcatatagggccgcagttctctcggcttcactcagaacacggaaccattgctcgatggcactgagttcatccttaaagtcctgatcaagcgtggcagctgccatttcttccaatgtagtttcgtactgatcaatgtccgcaagccattgttgagcggcacggtccaaagcatcttctgtcgcattctgaccttgggtttgttggttgaaaaagacctccgatgatggacggatgcttcgggcggacagcggcgaaggaaacccggacatgtctgccgacgcccgcagctggtgcgatccgaggtttcgcgacgaggatggaggacggagagttgaattcgatgcttcaggagtgctgttgcgattgccaatgatatgactggccatggtttagggcgacgtgttgagaggatgactagtaaatacagtgggggaaatgattactgcaaaacacctgcaggacctgctgagtttgcgtaacaaataaaatcaaaaaataaccttcaactaggatccaggctaagatcctaaggtatcagacgacgctgaaaagatctagatctctcgttaaagatgatggcacagaccagtccagtgggctgcacctcggaaattcgagatagaaaaaattaaggcctggaacgaaaggaaattgagacttgaagcaatagtgtgtcaaacacagtcaagccagtcccaaagaaagatgaaaaggaaagaaaaagggggaagagaagaggttaggtggagagagaggagaggagaggaagatgaggaaagttggggatgaagaagtttggtgaagaggcttttctgtttcaggccgcgaaatcacgggttcgccgaggagaacctcagggacaacattctttcttgacttctccatatctcatgattctgaatcttgagggacctctattttctactctttcctgggaattctgctcctcgtggtcaaatccgaatattttcttcagcctagtggagacgttactatgaatatctgccgagcccagacctgagattcagcgcgcaccaactatactgataatgagcttccttggtggtccacgtttctagtaattgtctcaaactatagccttatcggcagtggaaaacacttcctattgaactttcaatcgtcactggctatgagttcccagcattacccggacgggattcctctggatgaggagatgcacgaggggcagtcggagtatccagatatcgatgaaactgttcgctatccctggcaaaatgatcaatcttttaatgttggcgacatgcttgcctcggtgattgatcctcgtttgtttggggaccaaaatccacaaatccaacggcaaagcatcaatcaatatcctcaagatctcaatgaagaccaaggcgaagtcgaagaagagcaggaggttgatggactctacccggatgaatatgacagccaggggtatcccccagtatcatatcctcccgtgcctggcgagcaagccgtgtcggacgaggactttaccttatctggagacgaaagcgagaggtacgtaagttaagacaccatatctccggttttagttaacatgatactagtgattctgatgaagatgaaccagcagaggatgatgacgatgatcattcagccgccagcaggcgccgccgtcgtggcggggggcgcttttccgcgagatggggggcccgnnnnnnnnnnnnnnnnnnnnnnnnnnnnnnnnnnnnnnnnnnnnnnnnnnnnnnnnnnnnnnnnnnnnnnnnnnnnnnnnnnnnnnnnnnnnnnncccccgccagcgggcgccgccgtcgtggcggtggtcgcttttccggaagatggggcgctcgcggtggaaagggcatcaaaagaggaccacgcaaaccattggagcccagtccggaattcaagcatcttcattcgggggctacctctgccttcatcgatggagactacgaacgggccattgatctggtgatgcaagcaattcagattaatcctgaaatgtttgctgcccattctttgctctcggaaatcttcctcgcacaaggagagaatgataaagccctagcagctctattcaacggagctcatacgaggccgaaagatcccggtgtctgggtcaaagttgctcgactcatcttagatcgcgccggagagaatcggcagtccgcattgcatgatgtagcttattgctacagccgtatcctcgaagtcagcccctccaacaccaatattcggttccagagagcagcaatctatcgtgagctgggtcacaatggccgagccgcagcggagtatgagagattactcaaggactgcccacacagtgccagagcactgcgccatcttgcagagacgtacattgatctcaatgacgtacaaaaggcagtagattattatgcggacagcattgatcactacctatccatcgaccccgaagcctctgatttcacctggtcggatctcaatatctatgttgaactttttggctatctcaatcaacccgaagaaggactcaactctttgagaatacttgcacgttggcttctaagtcgcggagaagattcagtatgggacggccacgaggatgacgacagagaatgggacgctgatgattcgccacgacggatcaaaaccgatggttttctgcccgatcagtggcctcgagagtcatatgggcttggtcttccgctggagcttcggataaaaatgggtgtttttcgcctgaaattgggcgacaagtatcacaacgaggcattggtgagtttgatcccggatcacggtaatgactgaataaactaatacaatcagcatcactttgaatggcttaacccagaagacgactccgaaggtgcccgaattttcgactatggtgatcttttcagggaagtggcagatgctctaaagcaagccggtctcttcgaagaagccctccggtactatacgcccatccagcagaccgccgaacatgccgacattagcttctttatggccatggctgactgctgcatgcagttaggcaagatggaagatgctgaaagctgttatctactcgtcgctgaacacgatgccggtcatatggagtcgcgagtactactagcgaagctatatgagagcctcgggatgagcgaacaagctatgaaatatgttggcgaggcagtcttgatcggccggcaggaaaatcgtagccgcggaagaagaaaggacaccagacttgaacagcttgccatagaattcaagatggctgaatcagaacccctccggtcaattgcacccaaaccgacaaatacagcaccacttatgaatgcagctccttcggctcctggcaaaggacgggcgcaagctggcgaaggtactcggagtgatgatattcaattcttgtacgcgaagttgttagagttgaatccccaagtcaaagacggtgtccctctggccattgaagattggctggacattgctgatgctctattgcgagatttccggaacaatcgggcattctatccaatggatcgaagtattgctttcaggggatattcgactggtgtcaaatccaagaaccagaccaaaaatggcacaatgatggatgaaatgcagcaaatggcgggccgtcttcaagaaaccatgggtatgtcacccgggtccatcctccatccacaccatgctaatgttatatcaaggagatttctcggaggagcccttgcagggcgccattcccaccgactaccatggaataccatttgatgagtggcttgacatattcctgcagtacgctttactcgtagtagaacaaggcgaaccagaggaggcctatgagacccttgattctgcggcgattgcaagcatctggttgcactctaagccaaaatcccgattgatacatgtttgttggttcagtgagttcattcaattcactactgagtggttatccactaacacttttacagcatgcgctctccgcgcacgagatgaagagacactggctaatgaagcccgttggtttatcaaagaataccagtttgtcaccgatacttatcgactcttctctatgctgggccacctatgtggcgaccctcaccgatcccttttccattcctccggaaacatgaaatttatgcttcgtcaaatcaaggcaatagactttacgatgccacaagatacgcctcgacccattcggcattctgtctggaaagagcgcgccactctatccacacgggatgaagccggtgagcctatcgctgcgaaagagttagatattgctcttctggtactttatggccacatgctgtactctggaaacagtttctatcccgccctgaactattttttccgagcatatgccatagatgaccaaaacccggccgtcctcctctccatcgcactctcattcatccatcactctctcaaacgacagtccgagaatcgtcactaccttatcatgcaaggactgtcattcatgcatgaataccggctagttcggcagaagccgggaactcttctagctgaaaaacaagaaatggaattcaacttcgctcgtgtttggcactcgcttggtctggcccaccttgctgtcgaagggtacgaccgggtgttaaagctcggcgagcagattcagaaacaggctaagcaagagtctcttcaagaagtgacacctgcaatggatggtggtgatgtggtgatgggtgatgatggccaacaccaaaagacttcatcgcctactggtcagcctttcgttgaggatttctcccgcgaggccgcttatgcgctgcagtgtattcatgttctcagcggcaatgcacagacggcaaaggccgttacagaaaaatggcttgtcatttgatataagttcgtgtctgctttccagactgtctattacttgtaatgtatttatatgagttaaagcctcaaaatcaacactactgagttaattcataagccattatattcaaccagccttcacatgaatgtgatatcaagataggggatataaacccaggacctgtgaatgtcgttttaatatacggagttactgcatgtacttctgtagatagaaattttgacgttgggttgtatcacacccaagatgggagtatttctttctcttgatgtcattacttcaagaccttgaccaacatatcctaaagagaatgagctcactgctgcatacctctcctttattacataacgggatttcgctgcagagattatggggttgcatttgcctccttatctttcaacccccaaggttatattacatattgttctcgcttggctgggcgaaagggaggggactctggttttgagaggagtcagttcggcatcatttcagtcagtggaaacattgaacggggggaacaaagaagttgagcggctgtgaactaaccctagttgacaagaatgtggggagtgcggaaatgcaagcggaaatgcaattgcaattaaaatgcttgctaatcaacatctcatatacgccttaccattgtggcttattactagctcacaaatgactttgcaggccgaagtcataattctttcgagtcggttcggccctacctcgcataaattcaccttaaacctaatgctcgtgtctttcggcctcgttgatgtcatcgagtcattgatatagagaagataatacggccacataagattctaaaccctagagaatgactgcggatagcacccaaagggtcggaaaccattccagctctcaaattgaaggttctgcagaactattgccgatcacatcggcgcaatccaattctcccgcagcccaggggtttgatgaagacgaaaaagaccatgatgtcaatgtccaaagcacgacagaagagtcaatagggaagcgcaaatattggagacgttttatcgatgctgtttcatggacaccgccgcgatgtcgatggaatacagagaatccgatcaaattcggcttgcctttgaatatcctgttcgcattctcggcaactttcacggtatagcactgagagattgcaatatatggcatagcaattgctaatatggccatgcaggtcgccaatctatactattcacatcccattctggatattcttgctcaattcttcgatgtctcgcatgagcgagcctcgctgatcccgacctgcagccaagctggatatgcgacaggattaattcttctttgtcctcttggtgacttagttcggaggaggcacttcgtattgctcctgacgcttgttactgcggcattgtgggttggtgtctgtatcaccaagtcattcgaggtattccttgtgctgagttatctatcttcggtcacaactgttactccagtaagtggttacaagcaagcatatccgaggctctggcctaaacaaaaaaattaatcatcaatgcagcaagtcatgctccctctcgtcggagatctggtccccccagctcgtcgcgcaacagccctatcaatcgtgtcttcgggactcgtcctgggccttctctttgcccgcctgctctccggtatagtcgcagaatactcgtactggcgaaatatctattggctatcactaggcctccaattcctcattttcgcccttctgtggctgttcatgccggactatccatcaacaaacaccaatatttcctacttcaagatcctatattccatcatcggatactactggaaatccccagtgcttgttcaggcaactctcatgggatttttcctctcggccacattcaccagtttctggacaacactcaccttcctcctatccggcgatccctacaactacccaaccctgacaatcggactattctctctagcaggtcttacacctatgttcctaggcccactcttctcacgctacatgatcgacaaattcgtgccgcagttctccatcctcgtcagtttcagcatcctgatcaccggcgtcagcgtcgggacctatacaggcacatatactgtcgcgggcccaatcatccaggctgcgctgcaggatttcggtctacagatgacgcaagttgccaaccgtgttgcgatctacagtgttgcgcccaaggcgcggaatcggatcaatacgggatacatgattggcgtgttctgtggtcagcttatgggtacctctgttgggaatcgtctctacagtcaaggagggtggattctgtcgggaagtgtcaatatggcatttattggggtggcgctgactatttgtcttcttcgtggtccggctgagaagggatgggttgggtggcatggtggcattcgcatccgaagaatagagtgaatcagagtgatgttctgccgtgcttgggcttttgtgttcttctacagaaatatagttcctgctaatatgctttacgctagactacatgtgcgtagaaccttcaaaagtatcagacctcttctatttatttgagatttaatgatcaccagtgcatttaacagcaagcttataaagaaaacccacggtagacatatagtatacgccaaactgctgccagcctgctgccagcctgctgaacttcgaaaggaatttgagtacttatctatttttagttatgtacgatgacgtgaatcagtccaatttgtgcagattaattcaacgacgtcacttgaaaaagaatggctactacggagtactccgtagttgattcaagcttgagatccactttgacactcactctcaagattgtagtaagtaaaaaagaagcaaaggtacggaaagaccgattttgtaaaaatgatagaaaaataaaaataaatgcatcaggagggaatcgaacccccctcgccagtttacttgataaggagatttcctaatctggaagactagcatcataaccactagaccactgatgcaatggatatgtttaaacgtcaaccagtatggttcatcaagtagagttacatatatattggtctccgcactccagcatcatacatgtctgtgaaacactgtctgtccagacatataatcccggcgacgctccactaggagataagggattgggcaatgtcgaattcaataatagatactaagactgtgatggctacacattccatacaacatggttacagtctgcgggctccggcggccgatcaccttagaggagataagtggcttcaaattggcaaaaaaggagaatcatctccctaagtcaatcaatgatattttcaagttgatagagcagatgctagtgagaatgttggtctttgtcttgctgttgagtctaagcctacatccagctagtcgccagggcaaattgaatgatttgtgtagtaaattgtcctgtcgggctgtatgattgaggtaaatattggtgactgattactcagggcactttctacgattgatggttggcacatctgttgaatatcaatatcttattttctagcgctgtgatattatctgcactgccagttgagacatctgttgttctgcccttatatctagatatagttaatttgctggtaatcacgtagcagccatatttcacagggatatacgatttgttagagcctccccttggctattggtcctgggattgatttttacacctgtgatgaagaggacagcgttatatatctttttttttttttggaaagaggtccactgattgagtaaaccacctttataatcaacagccgatcctaaattgagtgtggcgagataaaacaggtatgcaaatgcaacgatgtcaaggaaaagaatgaatgagcgggagtagtggcatactccctgcaagttatctgagctacttctctacagccttgtcatggattatcccaagcgacagcctctaggtgggaagcctgtatggcttgcaaatccaacgctcaatatctcacttaagaattgaggtgttctttttctctctcttttgagtgaggacctggtagctaagcagatactcttggccagccttattcggatagtcataagctgtctgttgcaaataggacgatctagacaactcagagcccgaccagtccgagatgagggtgtaggcaatcaggattggctttgtcaggaaacgcacaaatagctggtcttaccagaacctgcgtaatcatttccatagatttcaatataattgtacacatgttcgtagtaaagagaacaaagttgaatagttggcagtcaaacttaaacttaaatctatgggtatcagcgtctacaccgtagatgaaacggctatgctaggggcattcgaaggaaacgcagatatattgtcaacgccatatttgtcgaccaggccgcgtttggaactcgcagcacgaacggcaagcaagtcgcaggctgctggtgttagaggtgttggtcgctcatggtgcttaaagtacaaatcctagactatgggtagccaaattgtgtccaaagtcaatgatcaaaggatgaagatagaaattttgcattgtaataaaaaattggagagcggggggggggggggggccaccccaaaaggaaannnnnnnnnnnnnnnnnnnnnnnnnnnnnnnnnnnnnnnnnnnnnnnnnnnnnnnnnnnnnnnnnnnnnnnnnnnnnnnnnnnnnnnnnnnnnnnnnnnnnnnnnnnnnnnnnnnnnnnnnnnnnnnnnnnnnnnnggaggcgggggggggggggaggaccaccaccaagtgtaattagagaaacactttcttgcaaaccttgccctgcgaaggttccgtctcttcatcgtttccaatctcggtaatttctacttccttatatcagtgtctaatgtcagtgtcacccaatgagttaaggggcagtggcttgaagggacattacagtaatcagggagccatatctaacgcctttcatcaaagcccaatcccaatgtcgattagcgctagtaacccattttggctgtcatgatgcgctttggtcttcgaaactacagaagcactactaatgtaggtcattcttattcctactcgaattactcggttcttggcttgtcccaccactgccgcccaaagcgccagttggggctcggtacggatgccatttgggggcactgccagcaaaggcacgtttctagaaggagcatagcgctcagggtcgcatgcacccatctgatgcctgaatccctcgatctcaagtacccctcgggagctacctcacttttatactcccccgctcggccaagccgaatttcagcaaatggtagtctccgctttatcaatatttggcaggtgtccttgaggcactttgattagaatatatctcccccaactttagtattacacttgaagctgtctatgtacacaacatagccccgtttgataagaaaaagaaagaaaaacaaagcacatgatcaagcgcagcagaggcaaaactatatacgaggccaaaaacgatcagatgcatatcaataagacataagacaccttgctatgccgatgaaggggggtaagcgggaaacaaaaaagtaaacacacaatccaagggcaacgggtgtattatccgaaagtgcccaccaataccgtcaaaagccgcctgtcattactggatgttggatatccaaagtagcgggaagtagtattatgacgaaagatagggctgcaggtgccccgaagcagaaataacctagtttgagccataaactttgatagagccgctcgggccgcctgtctttttctctcagatgaccacggcatcctcgtcccgatagtagtctggatcgtcaaagaaaactgcagactggcgtcgtagttcctcgatcacgcttccccgccgggaactgggggtatgaggacgtgatgagccggttgattgagacatgctatctgacaagtcaccaaaacgcgactcgttcttgtagctagatccatcgcgctcggggagattttcatctaaacgctccaccatagagtctgcatgttcattttcccgattgcggattcgacgggacaggatcggggagagcgcacgtccacccgttctagattcttggagtcctttcatgatcgcattctcgaccttgagccggttttggataaattggattttggagaaagtactctgctggccgacatgtatcatgcgggcgagcctttcaggagtgggatcggaaagaatgtggatgaaatcggaggggatcgtttttggccagatagttacagtgccactgaacttttgcaaccagatctcgctccaatcctggcccaaaggtcgtgggaggagctctaaatgccgaagaactcgaagccatttgttgaggtctaatttgatgtactgctcgattgcggtgccgaggaagcccccgcgccagccacggcccctgcggtgtgtgactggtcgccctactgtccctctagaactaaagaagaagaggttgatgtggggattgacctagggtagtgttagtggcaaaggttaaaacgtaggaaaggaatctcacctgggatacaatcgtaaagttgacgttgaaatgcaggttcaacgctttgataggtatatcagtccgtaggctaccatccttccatttgtgaccaaacgaataaggcgcgagagtgccatcacgctttttagtcattaatacaacagggtttaaaattcccggaacagccgccgaagcaagcacggcactccatatgacacagtcggggcatgtcagataattggctaggatagtcggtgagtgaggatctgagggcacgcaggtgacattcaaaatacgcccggtccgctcgtaagcttcacgaaaggtcgttgaacccctgcagaaccaggcgcattgtcgagcccagtccatagtatcgaaccgagcaccagttcgccaccagcgacggatccaagttgccagtccttcatggcatgcgcgaatccgatgtgctaaagctggaacaagcagctgctttagctcatcatctgtccgagttgcgactagtcccgccacaagtgctccgcctgatgtgccagttatgatttctgggaggacatcattatccagcagcgctcttaccaccccgaagtggtagtaagcgaatgtagcaccacccgaaagacaaagagcggtgcgtccaaagtttgtatcgaggtgtttgaaaagctcatacttggcatccttgtcaatctgtttgttgtccaaaatgatctgtatgcatgcgtgcacctcgtcgatgtattcctgaaccagctcctttgttcccgagtatgtctcgctatatattcgaggattttccacaccggaaaagttgttcttgacgcaagcctctaaaagtgcttgaagatcttcaatagcaggtacctcgctagagccgacccgaccattctccatttcccattccaccttcttcctcagctgcttcagctgcgataccaccttgttgacagtgagatggtcgtaataagcgtattcgtctgtctttttccacttttcggttccgagatggacgtccaatgcttgagccgctttcagccagtccggatagtttttctgtgcagatagttcctgacgcagcctttgccttttcccccgccatgtcacccactgttcatacaatactatgtagacacgcaccagagcatagccaaagctcagtactatgagccacgcgaatacaatgaacaggaagggccatttcaaaacagaatatagcacgccttccctcgtttcatccttgcttcgctttggtgttttgcggcggccacgattcttgcggactcgttgattgattgggcgccagtcgttgatggctgtcaatggggaggcttctggggcattcagcgccttctcgaatcggtcgagttcatctggctgaatgaagtcgcggtcgtagtcagggagacaggccggatcgtaagggtcgtacacagcaggtttcttcttagtggtcatgttcaacacattctgaatacaccaacgaagattttgagggttacaaaggtacctggaaagctggggaagctacgttgtacgatcatgacgttggcgtcacgtgtagtttacctccacattgcggctagtgtgtttccggaaatagctagtctggttttctatttgctgagtcatccggatcctgccccgccagataagaaagaaaaaacacaactacaagaaccatccggtagctaaagagcaattgcttcgaattcagaagtctgttgctcttgcagaaatgagggaattatgtagatccactagaagcaatctcttcaatattaactttgtcacagtcacgcaatttacaacctcgctcgacattctttgtatcgagagtgaattaactttgagaaactatggcaggcatcatcccaccttgacatgctgcggcatttcaggacgacaatgccgccgcccgtgcgatgtcattgaaaaaaattgtcggaatgtacccctccatgtacctcaccagcaagaaatcgacatccctccatgcgatctcttattcaatggtccaatgcgcaattagcggggtcgtcgtgctcgcctcccgagaccaaatgcgagatttcttttgttcccactcaaaggattatactacagctcaccgctacatggtgggcggcgcgaatatctagaattatattgccggcccgtgattggtaggcgtctcggaagagtttgtttgtcgcagccgaattggaggtctaggaaagcatcatgggctatcagcgggggtgaacattactgtagccatatgcataaagtactaggaagtgctttgtgctcgcggtatcggacatcaggtaccgagtagtagatcggaatgttagccacctttttatattatacagggaagcgtcatttcggtcacctgatgtaaaaatgaccccttatatatcgaggatgttttgcagcaactaaatatccttagcgtcgtcataggctgcagctgtccataattagattcgtttaggggcggttattccggacaattttccctcttggccatgttcgtcttccatgctgatcacaacctgctaaattcgtgaatgcaaatggtaaaatgcaatatgttgcgagtcatgggtacttattgctactttgcgattctacaccgtacactcgcttatactagcgagttctaagcatcatttttgatgtgtagccttcggcttgtcttgtaatgatacacaacgggaagaatatttattgtcccgtgttgcgcggtaaccgctcagtttattgtgttgctttaaccttttgtggtatccctgaacgtgccgggcgcgccgagttggagtgcggactcatgtcagggttaccctgttctcttgagagccttggcattttttggtatcttcaatctaaactcgaacccatcattccccatttggccctatgcagatcatggatcttccctcgcgaagtgttgtggcgttgtaggagccggtgagaaagcttttccccgcttacaaatttaaccccagtaactcctttccgaaaatgagcggcaaccgcagaagagaccaagctcagtgagccacattcgggtcttggcaagggaatgatgcgtatgccaatgacccgagccgtgtcaagccaatgaacagcatatcgcactgcacacttggcggggatcgtccaagggtggggaaaactgtccctcggatctccgaggccgggcaacgcccgaaatactcgaggccaacttacagtaggtagcgtttgttgttatgatgatgatgtctacggtacggagtcaacatactgaatatatacatacaatattgggtacacacagaggggcaatgtagatcgatccgacgtcatgtgccccctcttggttatgtaaaaggtatcagttcaatgtgttcaaacgtttatggggtttgaaaagactagcgtcttattttgtttcaagacatacttctggaaataacagggggttgtccatattatgccgcacatacaaagtacatatgcgcttcatagcacacacttcgataatggcagggatgctgtagactcctcgcatgaaaagtgcagtgtcgtatgcagcaaggctgggatctgaagttgaaccgagcgtttgcggcgcatttacataaatgccctggaatgttaagttaactagctctgaatattttgatctaactacaattataccccgcgctctaggatctgtcgcagggattaaaaaataaaatcagccatggcaattactgtgtccaaagtctttgaagacgcattttgttcttgatgctcaaatatgaaacattagcaatataaactgatgtcaaccacaactattctaggggtcaacggtcaacacccccctcatagagataaaatacatagagagatgaaggggtaacatcgaaccgtgggttgacgcccttatccgttttctatagaagcggtgtggctgatatcgggacggagtcgagtcaaaccatgggtcagatgaaaccatatctacatctcggtaacactaatgactcgtacggtatatgttgcagttgatgtcatctggagtatatatttaaagtaaaccaagccattttatatttccgattcccagcgtctccactcatcgagaggaatgtcagatgtcagtgcgagctgacggactcggacgatcgcagatagcgtaattgcgaattctagggttgaatgtcgctgattcgtcctttgacgggaaaatcaccaaggtatagcaccaaccaggtcctctgttgatgctcattctcgccgcattcactaaatggctacatccactatttcccctttaaggagaaaaggcatcctgcgagcatgcagttatcctcccatgcatgtgcgcccccgccaatcgtgtgcctcgtgcgatcatttgcttccttctcaaccctgattcgatcgcatgcacccccttcagcacctacaggtgaccaactacatattcggtaagggcacagcctatgagtcgtcctctcgtactctcgtactctcggggtttgcgctgaagagtcagaatggcccaaaaaaatagatgatactccatatggagtagatgagccggtaaaaaaaagtagaaaagcgggccaacagaagcacagggcaactaggccagttctcggcattcccacccggtctgcatcgtggactcaggttgcctgcgtgtggctgcgtcggagattgatcaacacgccgccaccgagatgggactcatgacaactttcaacagttcctaggaggggtgggtttcaactgcatgaatgggaagacgttaaatttttttttacgtcgatcaaagagaggcccctctgtgctccgtacaggacccaccgatagcatatggtctgagtttccttgctccacgatcggctcataatgtactccgtagactcaatcatgtaagaggaatcgaaccatcacggactaatatttgctcactattgagaaaaaaatttcggctgctgcttatagggtaatatgggggcttaacagggtaatcgttgactccaatcgtttcgatagacgcgggagagaagtcggcgaactaaattcctaggcgcagtccccataggcttgccacttcccacccgggtatagtagctgcattagtggcagagacttattcatattagtgatggttatacggtattattagactaagtacggagtatggaccactccgtagtctgtgtcttatagattacttggataggtcaaatttgggggaagaggacacatgtagggaagacgaggcagaatcggacaattgcattcataaaagcataagataataaaagatccaaagtagaaaccgaaatctctcggaagtatatcagacgactatcaggagaatatgctctcagctgataaaagaaagtggaaatcaatgtttccaaggttgtaaacgtgtattacgggcgtatatgcttgtgtattgtgttatcaggataaggcgtattattttagctaaataattggttaccccgtgccaccaccttttccctcttcaccttttgtcattcctctccaatctctatctcacttttcgaggtctcagagaggagatcgagtcgttctttgacactccatattcatttctcccaggtatcattcctcctccctcacctgcctcccggcgtccccgaaatccccaatgagactggtcaatctcagcacaccgttgctaaccttcgcattcagagcctcgattgctcgctttttttttgggtctcacttgggtcgcacaagcaagatgtcgactacatctagcaacctttgttgagccatctatcttcagagttctcccggtccatcaccataccccccgcccccgttgacgccatggagaaaatcaacaccggggatggacaacttttcatcaaggtttgtgttcctatgcagctgtcgcctgatcattgcgatgaccagagatcgtctgagtgcttggtccgatagacagctgacgcgcatggttgctatagaatgtcgctagctacgttcgcacacacgagaaggccctcgccaatgcactacagctccgtcgccagcccacaaaaaatgtcattccccaatcgcccagtgtacctttgacccctggtagctctttcgcctcgacttcgtcaacactggctgcggccttttcatccgcagcattgaaattcatgtcgcagaacgccaaaaccgccaaactcacattgactccccaccaccttttctaccttctctcccgttttgaagaattgaccattgccgttggtcctatgaacatcaggctggaaaacattcacaccggggtttcgcaatcctatgtttcattcctgaacaagccccaacagtctcggggcgatcgggcctccatccattcggtgtccagtgtccgcagtgtgatgtctggtatgacggacctgtggtcatctttccgcatcggatccaaggataccccgacgaagtcggacagggccaaggccgctttggaaatggacttgaagtatttatactctgcctttaccaagatcccgtgtcttcgtcttgcccctgaccaccgtgctcctcttatctctggatatgaagaatttccttttgatacggctgtgccgctgcattccttcaagaatttgagcgctttagagattattgatttagactaccgttctttctatggctgggacagattgtctgagcaactacgcactttgactatcaagagaggtcacctggatgatccggctgatcttttaacgagaattgtgttggacgacattgacaaacgccgccgtcggtctgctaagtcccaacagtcgccttcactaggatgggccagttccagcagtcagccgtttcacactcccgaccaggccaattccatgtcagcccctggatctcctatcgcggacacagcattcggaactagcactagtcccagatctgccccgatgctcagagctggctcggaaggcaccaaaattcgccccagggccgggagcgtctctccaactcggcctacgacaaagcacagccaccgtcgaggccagtctcggcaaattcgccgcacgggctctgcaagctctgaatcaagcgagacctctaacagccatcgaaatggaagctctacaaaccttctcacagacatcctcccgccttcaaaatggcgattcctacgacacctgggccttccggaaaattccctgacatccgtgtctgctgccagtcttgcccctgtagccaacagtctcaattcgcttgatctgtcctccaacctcttggcggagattcccgacggtgtggcatcgctggtggcgttgagagccctcaacttgtcgcattgcatgatcgagtctcttcactcactcacccgaaatcctcttcccgccatcaccgttctcaccctccgcggaaatcgccttcgttcgctcgcaggcattgagaggttgctttctttggaaagattagatctccgcgacaataacctcacggacccgactgaaattgcacgactaaccagtcttcctgaaatacgcgagatctgggtatctggcaatccgtttgtcaagactcactccggatatcgagttgtgatcatgaacctcttccgccgcacgcctggttattccgaggacatcataattgacggtagaggtccgggatacaccgagaggaagcaactggtggagcgagttgcagagcctcaagctgcaccgattgtacgctccagcccggcggatgaatcaacggtcgtacagaagtctactatctcgaaagtgccccacgatcttgcaatctttaagccccaagaagacgagcgagatttgcacattaatggcacacagctgaaggaaagtgacgggggaaccaaccgtcgcaagaagctccagcgacgtaggatagtcgatatctcaacagacaacccgtttaccaccgatggtctgggcaattccggaagcctggctctcccggctcttccggttcagcaaattcaaccgccagttgaccgtccgaccgttgtccctgttgatcagtcatggaggctggacagcgctacgcaatccgggtcatcaagcatccgaagccccggaaagcccatgcattcgccgagtcctcctcttctacaggctttgcagggtaaggacaggacaatggatgaagagttttgccgtcagcagctggaagttctacgtcaggatgtgggccataaatggttaactgttcttggcgagaatgactgggataattcccgtaaggacttcgctcacagctctggggcgggcctggaccattcccctcacatttccccaccttcactcacccgctcgaatacccaagggatattgagcggaaatgcgcttagcggataagatacgctttttttttacagtcctcttttgccgggactccgtttgcctctcacgtttccgtttcatgacccccggagtctcttcgtcgtgggtgcgacgtttacctgcttcagcaggtttttttcatctcttttcctcttatttacgaggacacaacttccctcgtacggtcccccgggactcatttgaacaacatattttcagcatcagcagctgatcattctatgcattgttttcggcgttggacgacttatgagacatggtgggttggatgtatgaactatttacggccgtctttgctttccttttcactgtttcatgtctctattcccttttcccaaaacgcatcctgcgatggcccttgtttttgggggtcatctcgatccacggaaggcacagtgaaagacatctttttttcgattctagcgttgtactgtatgattctgaatttcgggcatgttggcgttggaaggatctttgacttgtattcccctcttgttacttcttggtttttcccttgttttcaattccttctgtgtgaagctgcatgacttctggagtagcattgtatgagactagagcttggagctcagagctcacagctcatttgagaaaaaaacgccaattattttggaggtctacttttctactaagcatgtagatatccattctatagagtagaggatccaatcgacacacaaaaggcattagctctcagtctagatgcgctatccaaactatataattggactattttagttagatcagcctattatttcgtgcttagaccccgtttggcgtcgagggcgttatgagtcgagacctagaatccaccctccccctctatgcaaattttttgcatcgtcaaagcgcttcttgtaacacggaaaagatataatagaattaatagaataatcgaatggtcggatgaaagtagaagggggggggagttcctttataagcgctctatatataacaatatcacccccctctctctccccttgaagatcaaacacgcgcaaacacaaaataggaacttcccgctttcttcgtagaaaagattctcttctcttcaacattcaacctcatctcgatcacgttcacgttcacgttcacgttgctttgaaagagtcaaactggtctgactattatacacccgagaaaattttctcccttgattgaaatttgccttccctcggaaccccatactcatctcggttcatctcgatccatctcgactcatccaccctccgacttctttcatcccaagtcaaatcgataagagctcagtgctctttcgctcagcctcgtttatcttgtgaggcgtctaggagctcattctcttctccctctattgtgcgcgtacacaacaactcggataggcaccaccgtccacacccgtctggcatctccgccagaactggttttttttcttctttttgccgtggccgttggggcccttctctagatctgtttggtcttgcaatcttctgtttggtaggcatctattccatttccctccgctgctgcttctcccaacacctccgaccgccaaagggggagaaaatccagcgaaaattttcgagcgcgctcgtcaatttcgcttcaccttgggacttggaatacagactagacttcatctcaatctgcgacgctttattaacttgtttttccaatagtaacaggacatagccgccgcgtcatcaaatctctgttattctcacccgatcgctccggaagtctctcttccaccattcgcttctctttttcttccacccattttttcttctttctttcgtgttttcgttagacattattcaccatggccgatcaggaagtggatctggactcgattatcgaccggctcctggaggtgaggggtagccgccctggaaagcaggttcagctgctcgagtcagagatccgtttcctctgcaccaaagctcgcgagatcttcatctcccagcctattcttctcgaactagaagcgcccatcaaggtaagctgtctttttgtgtccgaatcgttcctcggaatcagcctccgtctaacatgcgtgtctcgctagatttgcggtgatatccacggccaatactatgacctactgcgtctcttcgaatacggtggtttccctccggaggctaattacctcttcctcggcgactacgtcgaccgtggcaagcagtccctcgagaccatctgcctccttcttgcatacaagattaagtaccccgagaacttcttcattttgcgtggaaaccacgagtgtgcctcgatcaaccgtatctacggtttctacgatgagtgcaagcgccgatacaacatcaagctctggaagactttcaccgactgcttcaactgcctccccattgccgccatcattgacgagaagatctttaccatgcacggtggtttgagtcccgacctcaactcgatggagcaaattcgccgtgtcatgcgccccacggatgtaagtttctcccctcccctctggtgtaggtggttctattggcagcgaaaataaaagtggcagtgtggcgctgggttcgtttggctgaagcccaacatcgctgactgaaatagattcccgactgcggtctcctgtgcgatctcctgtggtccgaccccgataaggatatcaccggctggagcgaaaacgaccgaggtgtctcattcacattcggccccgatgtcgtctcgcgcttccttcaaaaacacgatatggatctgatctgccgtgcacaccaagttgttgaggatgggtacgaattcttctccaagcgccagctggttacactattcagcgcgcccaactactgtggtgaattcgataatgccggtgcaatgatgagcgtggatgagagtctgctctgctctttccaggtgagttattcaatttttatccccgagattgtttctaattagttcctaacctgctctttttttccttccgatagattctgaaaccagccgagaaaaagcaaaagtacgtttacggtggcatgagcgccggcggtcccgtcactcctccgcgaaagcaaaagaagaaataaaagaatcaatacgagcttccccatctgcagcaggttcgggcggagataagcctttcacaaatctctttaacagcgccctcatgacatcctccctacaccccccgcgagtcccacccccggatccacgaaaacgatgaacgaccgaggaaaccctcatccgcacccagggcagcccgatattcctcttcaactcccgcaacgataatatcagtcacattctcaaccctccagaccccccgggctctctctctcccagtgcgacatgcgataaaaacacaacagtcaccccatcatttcctggcccgtgcgaccctctgtacttccggagcggagttcaaatgcttatttcttcgttgtttctcgacttctctgtctctgtttctaaccatctggactggaatgtttttcctttcggcatcctgggaatggggaagggaaactggttatcttttctcttttctttctctttttcttactttttattgtcctgttccttgaccgcatgtgttgttgttttcttatcgaatcctattcgtctttcgacccgtcttctagtccgacacgtacgaggcgctagtagtacctttctctgctgatgcatcgtataccggatttggaatgggtgtctgttactagcggtgttttgtgaatctagctcgaccttagaatagtttcttcggagatctagattgtatgttatacgggctgcaacgattacaattgaggttattaggctatgatatctatcattttcggatagttaaatctgtcctggcattgatactctaactaatacattcatactccaatcaaggaattggaatatgtaaatacttcgtacatgtagtatgtgaccatacatacctgaagtattctatgtagagagctagcaatagcaataatagcaatcaatatcactatcactatcagtatcaggattcagtgcacactcctatgtttgtaccaagaaagaagaactaaattcaagtctttagactatagtaactaggaaaaaccagctagctagctcgagcaaaagcggagaacaaaaggagcaagaattgaacaaacgtgacaagatcaggtacagcgtagtcgagtgacacattcaagacgtacaagtacgtccggggtaaaacgttggattgggtttgtgggaggggggtgggtagcatagctagatatgggatgttcgggtgtagaggaatgtcggaagaagccaaagccatttctttcacttggacacttggccgagtggaatgatatggatttgaggttgacagattgaggaaggtgatcagttgtcaggagaacagggaggaactctgtttaaacgtattgggacaaccatctgattccctcgccgtatcctgtcggggaaaagataaaggttagttatgattgtttcaatgtctgcttagccagcacggctccagttttcactgttgggactggacgaaactcaccctgtcgcataacaacactgcacatgaacacctcgatagggcggataccctcgagagggaccttgcccttaccagtggtctggtagagaccgagctggtggcgcagctcatcctcgctgacagcatcggggtgatcgatcttgtttccaagaacgaggaagggaaccttggagagctcctccatggcgagaagagcgtcgagctcagccttggattcggggaagcgctcgtaatccttggcgtcaaccaggaagacgattccgctcacttcggggaagtagtccttccagagacggcgagctgaggggaaaggtaggtccgttagttatgttcagtcccatgattcattgtggggggtttcgtgttgcttagcagtatgcttgcgcaacatcagaattccccatcaagagcattactcaccctgctggtgaccaccgagatcgaaagtcgtgaagcggttgttaccgatagccaactcctctgaggttgggtgtgcggtaggttgcaggacggcgacacggtcgttctgttgaatgtcctgtcagcaaacgagccccacacaacgtccagttcttatatcatctctcccgtgctatatccaagctccctgatctgtacagaaatccagcgccaccagactcgggacctgtagccagcggaattgaacaccaaaggactagatcttctcttcccaaactcaacaccaacgctcaactcaccttcaacatgtgcagcagcgtcgtttttccggcattatccagaccgaggaacagaagcttggcgtgcttattgaggagacccagcgaggccaagatatcgtaaactataggggaaagaagcgaaatcagcaaattgcaccttgcacctaaagacgcacgcctcgatcacaagcagccggtaccgcggcacagccgtcgcatgactcgacatcagagttggaatgaagacatgcttagctccagtgcagctgcactgtccggggaggtatctcgttcactcttcccctgtgttcgagatcggccccggacgtcggtgactgcaggtgatcgggagtggtatcgggagggtacttacaccagttaacgatccacatggtgaagggccggagtcagaaattattgggaaagagggtgacgagcggggatcacagattaagatcagtaacaagctgattggggggatgtggatggacggggtggaagagatagaagcaaagaagacaggtttgatgttgttttcggggattggattggtgccttaggcaggaagacggaatcctcgcgcggcggtgacagcgataggctacgacttcagggattcgggctgatttgggtatatacggatgggtttgtaaattctctgtgatttgtttggggatattgatcataattgcgtacttctctctgaaccttcgccgtggcgaagacccgccactactcgatcttgttggtagtattactgttatcatccaccttaggagagaagaaggttcatctaaaatatatttcatattcactcccatcaaactgatggatctctttattcacaatgcagaaaagccagataggggtatatgcaccgcagccatgcaagacaacaaaggaagcgacctccagcaagtcccaaggaacgcagtaagggagaagagggaaaagaatatagatagacttccgacagaaaatgtaaagaaagaaccacctccgtgtaggaattattgaagagaagggggaaaggggtaagggtaaagaagccattcatgtggataacacgaagtcggcgaatatgtgtaagaaagcgaaaggcacggatcgctaaccgagcaggataacacaaaaaagaccctcgaaaccagaaggtcccgaaaaagtaggtatgtacaggtcaaaaaaaaaaaaaaaaaacggaggtgtgaaacttttcatacaagttctatgggtagggacacctaaacggataggacgagctgggcgtcttgagcgacgccgtaagctctgcacctctcagcaacttcgaggccaagctccttcatccgttcggctccatggcctggaataggccgtttgcccatctgctctttggcagctttgcggcagtgttgacgccagaacttttctttgcgtttctggcgcttcttctcgagcccttcgacaatgtcgattgggccacgagtgtgtagctcacgggtacgtgagtgttcatgctctggggactcagagaatggtggaataccttgccatcggtgatctttgtctagaccggcgaagaaagggttggggacacggggaagtgacttggtacggacgagaggccggcgctggaccaggtggctgatgttgacacctccggcagactcaacgatgggcatatcctcggtgagttcccatgtagctggggtgggcgacttcgctctcataggtggggccggggacttgagacgcttcggagagatgcggccagcgcgagggggtggcggggacatcagacgtctgggagagcggaggggtgattgcttgcgggcctcgccctctggccgtcctcgggtaatttcctcgcggtctcctttggaggataagctggagagctcttcctcgggttcgaggtcttcattgtcttccggatcgcttgtggggaagctggggtcgatatcctgcgggatgataatttgtttgagacggcgccgttcttcgaggcaagatttgtaggcaagttcgaggggacgatcctcatcgagagttccacagacaaagtcggtactatcaggaaggttcggggtcctcggacgaatcctaatgttcttggagcccttcgaagtgcgacggccaccgatcctttgtacaggggctggaagccagttcaagtgatcgtccgtcatggagtcgaaagatgtgttggaggcccggcgttccatggttgagggacgagcatcgatgggtgaactggttggttttgggacacggtgtgatgatccccaaaactcgatatccgagccatcatcgtcgctctcgtccgactccgcgaagccagcctcgttgtccgattcattgccgtcgtctgaagagaagtcgtgcacagtctcgtcgtcgtccggaaggtcttccatatcctcttcttcatccaaagcctcttcttccgcctgttcgccgagccgtcggatggccatttctttcttcatgcagtcgtccaaagtgatcttttgtgtatagtcggcctccctgttcacccattcatcatcttcctccgtagagctagcaaactcgtggaaccgggtggcttcggattcctcgaacttgcccagtccactggtggggatacccttgcgctctgtagacgcagagacagcctccttagaaagctctttgggggtttcttttaatttgggagaggctctgcgagcaagaggtgcaggggaaccgcggtatcgcggccggagggagggcttgcgcgccggggatcgctctctctgggaaacagtctcccgtccagggcacgcgaaagtaagtgtagttctgcgcttgaggacttgaatcgagacgtcttccgtgggaagctcgttcggtgcttgggctttgggtgggagttcttgtgacccagagggtgagacgggagatcccagctcattcttctcatcagtcttacgaccacaagcgaagctaatgcatcgtttgcggccaaggttggcctcgacggaagtttcactggcatcaacgacgttcactttgggagtcaaattcttctttccaatcaaagcagcatttttcatcatctgtggtaaaggtgggctgggagtgttagagaaagatggactcgtgaggtcgccgtcgctggtcaactcggctgttgagacgccactgaggttgctgtgataggatcggtacatgtaggagtcgtagtgggaggtgcgaggatcggttggggacatctccgggctgctcttcaatgcgcgcgtgagcagtgattctttgcggttcgttggccgagaaagcacgatctgatcggagttcatcgaagtagcgtgcataacgtgttcagggggttcgtcgacgtcctcggccaagtcggcctcgccgtggaccggcttgctggacgagttgggcgagatgagcatcttcaataggttgtgaaaagagaaggttctttctctgtcgcgagactgtgccatggtttcggaaggtcaaaaagaaaaagtgttcacggtatagttctcaggtagagcaaggaggatgtgggtgaggcgagtggcgtaggatcgagttgaaggcgaggtgaggatgttgcttgaaagatatactgaggtctttcatgcaacaaatgctgtccttgataataatcgatcaatgttaaatcgatcgaccttgagggcagaacaagatgtcccgagcgaggactagtgtcatgatataaaccgcatgactagggggtttcgagacgaaggagggtattcgccaagatcgataattgtccctaagaatggccaactcaatgctgagggagactagatctgattctcgaatacctccaggatttgaaggtccgtgctttcggagggatctcgatcaagaagaaaaagcaaagtcaggaatgtcgagaatggcaagaaatggaatggagtggagattataaagagtaaagaggaataaaaaagaaggggaagttcggggaaaggtcgacaataaaaacagaataagaagatctcgcatagaaaaggtgcaggggtctctccgatgtcctgggggggaagagagagtgtgggagtgacgatacggcaacccggcacggccgctttgggactagcggcgtttcccttttgaaattttatttctttcttttcccacgttttttattttttcaaattttcaatttccgcggtttttgtgtaattttggcttggtctagccggtttgggatttattcttttctttttcttctctttccccccattgacccccccagtgaccccccattttcccaaattgccttggttagaatgtccggagtagggctggagactccaggggccgtagcactttctgactaagaaaagctggaaatgtgtcctgcgactagacattggttcctgcgctacttgtaccgtaccatggattgtatttctatagatattccgtgtctttatttcggattcttattttatttcgtttctatttctatttctttatctcgatttcatatatatctacaaataaatacatcaacggtttcaccttcaagatcgaggtcaattgattcaagtggaccacgatgaccattgtctgttcagcgctggctatgagggattttgtgctgagactaaacccgtttcaggctcttccttggaaactccccaagctgcgacctctaagattattacttgccgtggccgtccgaatccacttgccaacacaatcaaatcctggtaccgagtactgaagaagaaaaaaatcgccttgatatcttcaccgtatattgtagtgctatgttgtacatcggagaccctcggtaatttttccattgcgtatgcgtatggtcatcttccacttacagaggccattctcatagtgcaacccggtatgaaaaagaaatatttccatccactcgcagattgtgcctgaacgctaagccgtcaaccttggccgcatttgccctagagctaacaggttgaattctcttactcgaccgaaactcgtaataaggaaatgatagctgaaagtataaacgcgctgcacacgcttgtctacatgctcttggcgggtttcgctgagttctcgagtcatatatctgaatgcttcatgttgatttcttaatgcggatgactccttcatctgacgtagcatccgcgggtgacatggaatattagtcatttactcttcctccatcctcattccttccttgtagcctcacaccacttcaatcctccgatgacctaactccggagcttcgcggatagaggaggcttgggaaattggatgttgcatatcgtacaatatacaacatactactccgtatataccttacaggttgtgcacataggtatccatatgtactccgtatacggagtacatatggatacctatgtgcacaacctgtaaggtatatacggagtagtatgttgtatattgtacgatatgcaacatccaatttcccaagcctcctctatccgcgaagctccggagttaggtcatcggaggattgaagtggtgtgaggctacaagacacagagtcgtatccactggactcctaactgtacctcaaaagaaactcttggctctgcttcctcccggtagatcagtcttggtatacatgctgtacatccagtaatttgtagatagaattgattattcccattggctctcatccagtggcaagtcccaaggcagtcctattttctagggatgtccactcagcccttcgccagcacggcctcgttcgacttcgtcattccgaggcgaagcgatttggatcatctagttgggcatacaatcgatctacaatacatctcgcggagtacaatgttgttttcggcagctttgtttatcgtcatccatctccacacaaatcaccgagaccagaaaggaaaatccctctccatgcccgatgacagacatgcacgagcaacctgcattatgttgtaaaggcttacgaagactcttacattaacaaagaacagcggtcagccgcgatcaagatctgccctagatcggctgaccgggcaagatcttccctgcgcaaaccgcaatcgcaaaccagtctccaaagtatatcgcataactcggacaataaaaaaactcccgccgaaagagaagaaaatcttgcaaactccaccagtcaccaaaaagatcaccgatgctgacattcacactggttcccggaggtatgcatactgcagccacaaccccccattcaacctgtagggttatgaacctctgtttagatcgcgacaagcttctcgaatgggaggagatccccccacagtccatctgttcgaacaggcatacccctgtaaatgcaatccaagctcactgcattgcatatcctcgagccgggtgaccgtgggaaatgagttgagtttggaatcgaattatggaagaagcttgttagcaaggcaacggctttgcgacagggattggcctggttcgaagctattgaattcatctagcagttttccctatattaggtttttattctttactccttcttcctactagtgtacttttttttacgtacacaggacaaggacacaaggacgattgtctatgtacagccgagcgatcttcctcaaagaacgattcactgtatttttagtatttttccctcttcttcccaatacggagaaggcagccggggcgcaaaacaccgtttcgaaaatatacatcgtattcgaaattatccaaggatacaagccgcttcctacctcctccgtttacaggacaaaagttcccgcactgacggcaataacgcagacgggaatataaaatttcttggccacccccatcagtccttggacttggacttgggttcccgcaaaaacgggaatgggaaattaaaatgagatctaatcctgagcggcattgcggatattgtggaatggaccaagaaagacccctctctcccgatccctcggagacgttctcccaagtggagtaggggaatatttgtgggacgggatgttctatacgatgagaatatggtttgatgtcaatggctactagtagtagcgctgtgttcgtggcacgatgggatcgcagtggcaatttctccgggcaaaattatcgtggcggccattcaattgacgagtcgcaatctgacacgctctttattacttaccccaagtcttgggtgtaagtaaacgaaggaatagtacgtgtgcccagcgcaataaggtgtgaactgtgcaggtggggatacggactccggacaaaggatggcacgagcgggatctttatttgacgcttagaacgtatcctcctcttagaaccccaaagtgaagcgcaagtgtatcataatagaataccagaatgggttgaccgggaacacaaccggggaagtggagttgttgagaagtaaagagattggatagctgcaagctgcaatgcatgcgcgataggcgggacgggtaaatgggttggaattaatccgagcatttggttagtacggaatacagctgtgtatgaggcattttcatattcctccaccttttgaactactgcactgcgccagatgcagttgcgtacttaagccctgttggcgttctgcgaattgactttgggtattcctgtgaatcctgtctcagacatatccatgttcttccaattgacttcaatcactatcccaataggctattcgcctttcgttctaccataccggaatgtcactgcgatcttggcagatgggcatttttcccgaggacaaagatattgcccgacatgtttcactcgcgcaaagagccatacaccactaatagactaatcgttggtctgtgcaggatgtctcaataccccagatcttcgccacatcaaagaatcaactgccgagtcggactcggatggccaatgccaatgccaagtccaccccgtgcctcataccgcgaacaccgttccattgagcagatctcccccgaacgtcacagcctgaacatcaacctcatgacctccccgccaagatagacctgagggttcacaaagtcatgctcggcaagacaggtggaacgggcagatcactgatccacccagcagtgtacagtgcaaggagatggtcagtcgctctaggccgcaccggaggaatgcttggcgacggcgcgtggtgaagcaaactgccaagatctaggcattggatcttcagaatgcgcccggtacgacgtgagctgtggtatggagccgtgccgaagaacaatgggtatttccggggcgacaatacggggtagaaagagcaagggaggagagggaagataattatgccgagtctccataaagggggttcaggttgaatgattctatttcaatacatgatgcaccccctttcttgaagagatcttggcattgaaaccccttggataaccatctgctccgtgataggattccctcgctgccaagcactgtgctacatatagcgaattctcaaaaaaggactcgttgacgcttggtctcggtagtgcggctattgaatgcaatgtatggggaatggcctcgccaagggcgatcatggtgatcatgccgacacatgagcgtgcatgaatacagtgtcttggcaccgtcttgattatttacgtgctattgtttgtgccaagcggtcgcgcggtcgcaccgagtgacaataatgcgttgagttagggggttgcagtggcagtgctgtgctattttctctcgggatcgacgggctacaggcttggccgtttgactcgttctggttcgattgagattcgcagcttgagcgtcggaagcctatctatggactgcctattacctgactattgaggtgtctagtacggagtatgctggcatagattttcccatgtacaatgaacatggtacctatatatagttagatgtaaggagcacgatgttatatgtacacttcaccgttgagaataggatacgatcgacactggtgttccttcacctcttctattacgaagtatatgttgtagacatacatacgaagtatccaaaaacctgcgtggataaatatagcaacctctcatagcaccgacgccaccttgccaatatcgcggctcttgtcatggctataagccttcatccctgcgaagccacgtcagatgcgcccgaactcttcaaactcctaggcaccagaatactgacccccgacatttctgacatttcaattccgacgtacaatgaatgtatcgccactgttcaacgcaaatcttctggaagcccccgcccatggacctctagagactagaacgtggttggctctcacgtttgatcatcgggtgcgaaatcgacttgccaatgaccgtttcaactgggaggtacatgggaatcccgtgttccaaaacacggcatcggacaccggagaattgatccttgagcaagtccacagaccgcagaacagagagacgaattttgaacggtcgcatctaggtactttctagcccctaagatgaccatctgacagcccccggtatcatgtctacagctaaatgcgcatgacacggcgatgattattggtacttttctatatctccctatgatatactccgcaggcggcatgatattattttcaatagggcgccgagcttgacaggctgaaacacgtttcgggtatcgcccagcgaagcagcaacatcgaattcagaaccagaaccaaaccaacagcattatccaatataccgcgtacagagtaccgagtacaagcagtgtacatgtacattgtataattgattacaaaagaaacaggtgccaattcgagcagtttcaaccgttgtccatcgcaataaccccaaccacaaagcatccaaccacggaaggatccatcgatgatcaccgaaagagggagaagtgcgcgctatcagcgggagttgttgcgagcgacaacagcccgacctacgtaatcgcgcaagaacctacaatattaccgatccctcattcgctcgatcgccagccaatccccggccgatatgacgccgttttgatctagggcgctttgaaggcgattcgagcgggttcgataatacatgttgccggattaaccggtctgtggatctgccaatgatttgatatcatatcagcgatgcgctgtgatgtaccatgggtttgaaaatgggggcttgagcttctaacctacttccaacgtacaatatacgtttcagatgggtcatttgaccttctgaactggtgacatcacggatggagaagggcatggcacgatggctgaacgcgtggctggttactatggtagggtggcttttatcgtggcgtacactagcgatgcggtactttccgagatggttctccatctctactgtacgtcagtgcttgccctatacgatggacgacgttgggcttctaggatacaacataacgatcatagatggccgtgcgatgagattgtacatgttcattagtaagataatgtgggtttcatttattgttgatcttcggagatctatattgaggcagctatgagatatctcatcaatggaattataagacatgatggtgacgctcttgatgttcaatatctgattaatatgtctagactgctttcttctgattcagtatcctagcatatagtaaatttctctagcaccattcgagtcattatccatatgtcaaacctgctctgtcgatttgatactacacaacacgagtcaccggtttccttcgacctccggataattggattccatgtctgaatggaatttctgtttgaaatgttaatttgcatcagtaccatacagaaatatcttgtcttgcttttgccgctgtcgcttcttgtatcccagccagcagtatttcaccgtccatttaccagtatacggcacaaaataacatattaagacactttcacagaagttagggcatacaaagagatgagtcgggtggaattcagcggatattttttggtagttcgtgacttctatgactcctacctaaggcggaaagtggaccttcttcgatcatcgccgagcctcagactccgttggatattccatcacaagatttaatgtatatatactgacaaaatgattcagtagaaacctgtcgggtaatttggatagattgaatagagaaaatggcggctgaaagataatcccgccacatccaacttccaagcttatcctctgatgcctattcttcccctcaatacgagctgaaatttcttactttcttctatctctaacaactttcaatatttctaagcaatggaatctaacccaacatcctctcgctcatttgccgcttcttatgtatccaactcccgcttccatcgctccttcaccatcgaaccaactcctgctcatggccctctcaatgtgacttacggtgattacggccgcgagcccgatgcaaacggaaccactccgacacttctctttataccgggcatgttttcatcgcggtacatcggtatttgtctacacgcgattgccgataaatgcggcgtccgcgttttggttgttgatcggtaggtgtaccagcccttttatataacatgaactaaggtcaacttgtatatagtcccggaatggggaattccactgacgtgccgctcgcgcagcgaatgtcaacctggattgagaccgtcccacggcttttggcccatctagacatccagcatgtttcgttggcgtcgcacagtgctggcactatgtatctgttcaacaccctgtatcactgtcgggatatcctatatcccgagaaaccgatggctaccgttctaggtatgttaaatttcctgcagataattctgtcctttttgtatatattgttcatattggacggctatattccaacttcaaaggccgagatctaaccacatgacagcgccatttgttgaccccgccaaatctggcatgacatccttgaaaatagcccaatatatccccgccccagtcttcaagctctggcatcatatcccacgtctctttctcgccaatgatgggtctgcaacagcaacgagtggagaaatgattgccaaattctctgcctcctttccctcaaagagcggtgatgaccaggcaaagaacagtctgtacattgcgcagaactatggactagacatagaccagcagaaggagatagactctttgatgatgcagggtatgttcaaagaggacacggttggcgctaacagtgaggcgctacaatgtctacggaaggagcccaacacgtgggacaaatgtgaagactatgaggtctttgtgcgtgagttggtagagctcgaaagaggacgggaggggccgccactgaaagtccgggcattgtttgctgagtccgacagcatgagcggcaagaagggtcaagcctattttgagagatgctggcatcagatgaatgatggggactcagagggtgcaattgaatttgattcgagggtggtttctggcactgaccatgatagcttggtaccgtctgcggaagtgtgggagagcatcttcaagaaaatgcaacgagcggaagacaatatctaaatatggttcttgatatcattagctctacctgggctgccgtacgttcaggtatacatacatacatcgggggctaacgctccaatcattcattatggagctcatgcaaaggcttcagattgaagctgattgtctgtatcggctgctcacgcaacctctgtccataacgacgtaaaatttgaagaatctacgacccaatgtgatatctagacattatatataggatgtacgtgtttccagatgttcttcttatatatctttccactcgtatacatagacaaaaacaaaaacgtaaaccggacagatgatttttctatgtacaacaagggacaactcgtcacgagctgccgaaggctatcgacaatcctgcgctgatagaatatttagatatctagaaaagcgaggaagatacaccaagacgaaggctgtccagaaatagggccatgtgcagaaaaagttacagggactcgaacctgctatgtcttaggagagcccgagcggtatgattcggctgatcgcaatgactccagagaaaggaagaagaggcggaagatctcatttccattgtccagcatcttccgttccctgggcgacccgtttcgccccgttctcaagacctgaacttgcactaccgagcgcattcccaaccggctcgccagcactccccgtcgcgctgttgatagtatctccgagacctcgcccggcagttcctgtcactccacccactgtgcgggtgataccaccgactgtgtttccaagtgtggaggtgacaaatttggcagctccagtggcgcctttgtcttggttggattcgatcggcatgatgatgtgattgatttatggtagatttgagcgtgcttgcagaaattctggaatttcggaatggatgtaagaggataacaattatagaattatagattgtagtaatatggatcgaaagaaacaggtggcagaaggttgttatattaagcgcgcacgctatgacatcattgggtggcaggggtggcagtataggtttatgacttgtaagaatatcagggaatgagagggaaatgtggcgaggtttttcccaagtgtatgcgctcctgccctcgaaatcatacattatcttatccacatggcaggtacactccaacatgtatatcaacaagaacacgcatatgcgacctaggagaatgacttaggagcagcgtcagctccatcgtcttaaagccatggctggtctttcagtgattcctatcttgagcttagagtccgaaatccatcaataatatcagtctcgcggcctggcaagtgtgcggactggctcagcattctaaacaaatgagagctcatttatcttttcaagtgtgtgaataccgaccttccaaatggttgctttcgaattgtcctggacagattgatcacatcatcaattagttgctcggcgagctcagcgatagccttggtcttttaggcctcttgaggtctatcgcttttagatgcaggttcttgatcctgatgcactagacagaagacggacagcaaaccaatctccaaggtgacagcgattcgaccaaccgaaatagaggacatagaattagctcaacttgagcttaaagggtgaaacaacggatgttcttagaggttaagaggttaagagtactatatatgactgcctctgttggccgaagagagggatctcacgcatacacagaaatggcgagtaggatagtcagacaactgcttctgatgactaaatggaaatgtaattaactagttcaatcgatgtgtttcgagatgttcgatgatcaaaaacaacaaaatcgggaacaaaacgccctgcctgtcaaaacgcggtagggggnnnnnnnnnnnnnnnnnnnnnnnnnnnnnnnnnnnnnnnnnnnnnnnnnnnnnnnnnnnnnnnnnnnnnnnnnnnnnnnnnnnnnnnnnnnnnnnnnnnnnnnnnnnnnnnnnnnnnnnnnnnnnnnnnnnnnnnnnnnnnnnnnnnnnnnnnnnnnnnnnnnnnnnnnnnnnnnnnnnnnnnnnnnnnnnnnnnnnnnnnnnnnggttataatttcagaaataagacaaaggaattgtgaaaaatgtgaaagaaaaggcaaaaagagaaaacaaggccccttcagaggcgccgaatgcctcggcggccagaattatgttggctctggcgaacagacgatctctgactagcacgtttgcgtcgaggtgtttgttcggtccgctccatcagcttcacctgctctgtctgctctcgcagcctgcaggctttgacatcacgccaccatcgagtaatcacctcatatgccaactccatcctgactgtggcgatagcacacgcgcgcttatttcgtcgttctataaatgagcgccattcccgttgaataacgatggcggagaagacatgcttcaaaggcagaggccggggattttcagtaggcggcgaatgttctatttttttgggaactctgacggcattccctcgagtttcactcatattcactcgcttcattggctctatttgcgcttcattgggcttggttgttatgcgtgttctgagagtggcattttgcacagctggacgggccattttgatcaccgttgaatgattttctgatttgctttttttcttggtgatggcggaaaatccaggagggatattttctttgccgccacctgttccaggtttatcaaaggttgtcgcccctgcctggaaaaccttcaagttttgctggagcggagctctccgagtagatcctgtcaacggcttttgtggctggcgtctagtgtgttgtgacttgaaggttttgatcccagcatcccctgagatatgtggaattgtgtctttggtttgccgcttgggtgagctgtaaagatccatgaagacggtgggagtgatagagtcatcagacggaatgtatattgtatcccactgtctcgaagactcgtgtctcgacaggctgtgagttcgaccttcgttaagaaaacctgacccgacatcgaggctttctaacaagaagtaaagtttcatactgagttaagagttgagtcaattcctgtgaaagtgaggagtgtgtcgggattgttgtgcagagaagcggtcaggttaatcaagggatagattccaacgcggggaagatgcggggtgagacttgatgttatcaacaagtttgagcaactgtacagtgaggtatggaatcaataacacagatcgaggatagcctgtctccagggctggaacagtcaattactatgagaccatgttgacctgtggacgggttgtccagggcaacacgtgggggtcaacacgtgacatcatcaaaccgaaggatactaggagtacggatacggagtacacacttccccttgctgtacgttcttacgaatgcagatcgttcaattcggatatgactctagtccgatatatgtacttcttatcacttcgccgaagaggatctaatttcatggcgacgcccaaatcagccttggttgcatgatgtcagactgggatatggctcctctacaacataggccctaaccaagaactgatgtttttgttacggcctagtgacacgccattaaccggccatgcgggatatccgggaacctggcttcgtctcctaagtcctgcatccctttcgggagttagcggtttcctgcaggcgggccgatatagtctagagcgccgtcatcgaccgagtgatctccgatcattcttccgaggatactgcccattgcgccactcttcacggtatgaaggcattggggtcaagatcgacatttaactcgagatctagatcgtctattgatgcatctgtgaatgcctagatggatgaatttgaacatatcgggattctggtcacatgcattggtctaatctactccaatttagcaatggacaaggccattttacagcataaaccacttcttctcttgtcctgcgaccgcaagtccaaccttcccctcatcagctagttttgatagaacctgcgatataaaaggccccgccattgcctccatctcgggtccgtagagacttgcgatgatgtcccgcgtcgtcagcgatgcccttgtctttgtgttggccccgataaaagccgataaaacctttttttctcgcatttcccaatgtctgctccagactatgagtttggctggcaggtcgtcaatcacggcaccatgcccggggtatccaactgttatctcttcattgcgcacaccttgggtcataacttgcaaactcttcatatatggtcctagatcttccacaacaacactgcctccatgcccaagcacattatcacctgtgaacattgcgccgctttcctccaagataaagcacatgtggtcttgactgtgtccgggcgtgaacaaggctcgcagtgtagttccttgcgcagtaaaagtctgtccatcgcgaatcgaatgttggccccggtccggatgggccttgtggaccgccgcgaccagatgtggatactgagccagtagcgccgggagaccaccggtatgatcggtatgccagtgggtcagcagtacctgggagatgctcaactgatgttggtcaagatagttgacaagagtggtgagccagatcggacatccctgtcgacatgacactcgtgtttagtctccaggtactaaactgggagggtcaaaatcactcacctgtcctgtatctatcaaaatccgtttctggccactgccgactagatacgtattggttccttgtagttgcatgttgcctggatttccgccgagtattcgaaccacctctgtgctgagttttgcgacagctgggagatatggcagtccagcgtttcgggcagatagatattcctgccaccctggctgcgtccatactttcggaggggacatgtttcttgttgatcgactctggatgtccaggtagatacctaggctttgcgatttgagtaagtagtgttggaattgaaaggtggggtccattcgtcatgcatggctgcctgatataccaggtttttatccccaggctaggactacccgagtctctaaatattcaagctggatatgtatgtatggcttcaatgaaaatctgacttttacgatccgacaagactttctagtcgataatcatcacagtaccgatccatcgcctccaccttccatgtatcccagttcaagatgctaagtaagacctgacatattgcaactggaaaattgaaaatcaaatttattcgtattgcgagggcgggcaaaagagtcagttcggcaagtatgcggatagtcagcctccttgctagagatttgcaattgctaatatctctcgcgagtttggttctacatattaccgagcaattgcgcttgaattaggaggagcatgatcgtcgttctagaagcatcagggatggtgatctattcccaaaatggatatatacagctggcggattataatcgatgactcatcattgtgtgcataactcactagttacatgtctagaaggctcgcttgcatgcagcatacggctcgacagatggacatcgtacgaaccttgttggtccattgatcagattggctggaaactagccatataagtccacatgtatatcgtacttttatgtaacctctaatctcctttaaattacctcgacacccttacttataaaatcatcgtcgccaggaacaagtaagtgggtcaagtctaaattagactctcgtgaccgggagacctcctttccccggatgtgcctcaacgtggccctaggcattttcaacctttaacatttacattcttttgtgctcggtacttttctctttgcccggcgcctgtcgttttgcgacatggatctcttgtgagcgcctgtcttatcacctgttttgtgtcaccactcgcccacctcctccgctgccctgccaccgcggcatgatcccgcaacatggaatcaatcgtgtatgagaactcgcctttggccgactatttggaaggttcgctacgtccgtgacacgcgaggaatataggtccactgacagccgtgctaggggagggtggaaacgaagaaagttggcccgtggaggagaatcagagcgacgatgatcatacccgttcctccgacttcgcccctcgaggggcttccaaatttcaggatcgcgttagaaacaagctaccgaagcctctcaatctacgaggcacaccgcagggggaactcatcgggaaactatatggctcttgctcagtacgcgaccctccacgattgaacaggttcatactaacacttcttctcgctagtccgccctgaacgtccgactaccacgaagcgataataaacgatttttggaacaatttggctacgtcattgtcgcatcgcaactgttgaacgaacacagcgctccttcctacacttctgctgcagatgtcttatctgcaaaacaaccttcggatcttccgtcgctatctacaacttttggggttcaaggcgccattgtcacagctgccacatcattttctatcgcttggttgctacattggagccgttcgaggactgggtcgggattcagtctcaagaaagttggagtgctattgatacttgtgcccgctgtcggtgtctttttctatgctttcgcaaaacggcaatggttgaaatatctccggcaccaggctgttgaggcagctggcgctttcattggaaacgcccaggggtttgattctgctgcgtcggcttctgtggtttttatccaggaggttgagcttgtgtcaagaggctatcggatgtgagaacgtgattctttttgtccaagataagaacaggctaacgaattatcacagaagcactcctctaccgcccatcagtcggctggaagatctagtacaaacgcgacgatgcttgagattgcgccgagcggtttccgaatgcttctactccatgctcgagcgatatattcaatcccaaaacaccttacgcccacttaccgatgagggcgatcttgcgaagtattacgacatttatgacattggactggaagaactcgaagcggttgaggcgtccctgtcgcagcgaactaacgaagaccagtattcattgcgctctctaagggatctatttggaaaactgtacagtgtgagaaaaagcgttctgtgctgcttgctagcccttagcgccgatgggggtggctccgatattacacggtggagttcagctgtcgaggaaatgcgtgagctagctgcggccaccggcaacagcatgctgaaaatgacagcaatcttaaatgaggaggaccgtaagtattaatctgtgttgtatgacacggacgctagctaatattcgcaggtgatatcattcctccatctccattaccttccgcctcaccaagcaaggatcacctgcgtgctcaatttcgacggctcacctctttgtcacaaggggtccgtgccttgcatgctaaaatgcacattgccagcgaggagtcacatgccaatctagaacgcgcagatcctgagttcgaagcaaccctcctctcacaatatgattcggttggaaatgatcttagggctcttcttcacgaatgggaaactggtaaagccgcattggcaaaccaacacgatcgccttagtgccggggatcgctcgcgaccgccaagtactttcttacccatgtcccctacacccagtctgggaggatccacggcagttgagggcagcccaacggatgcactgaaagccttaactggcgaggcccggccggatctgacccagacctatgatgacgaggaaattttcgaagctgttgtattaccggcctcgagaaacaaaagaatgtctttgtcaagagacgagcgtcttgcacgtgtacgagaagaccgtgccagacaggcgattgccagagaaaaggtagatgccagtactaacatgctcaaggaattggaaatggtcatcaagcagcgaccaggaaacaactctgcaaaacgagtcaccagcatctaagacatgcttgatgcattccatataacctctttttttttgtccacgccatccagcacagatttgacttcgaccagcgctagcagcagtgaagtcacaaattgatacccacaacatgtacatatagacggggctcggcgacagcggtgtttattcgaggactattgcttcttgcttctttcttttgtgccattattatctgtttgactgtctttaagtggtcttggatcgcgatcctttcggcattcatctccattgagtgtggcgatcaacgttaattatttgctaatttgtacattacagctggctcttttacgaatgaattatccttccaatatcctaccactgttcattgtgataaaaaaccctagatgtatatgaaggaggccttattgccttattgcctgaggtatcaaacttaacccgaaacggacatatcgccaaacgcgaccgcgtcttccccacccccgaacgcgatccttatattagaccgctgcctctttcatcttcgttcaaatacatacccagttcattattctcgtctccccactactctcttcactaagaagccacactctttcctcttctatttccctacgactcagttaaaaaaaatccccacacaaaacgatcaagagtaagtcggccaactctcaaatcgaaaagattgttgtgtgcgaagaaccgaccaactaacccactccctagtgttggaagcacgattggaacaggcaagccttctgaagcgcgtatgtgatctataccactcaaccaattcagcaatgaacaattactaacactgttgtgtataggtcgtcgacgccattaaggatcttgtccaggactgcaacttcgattgcaatgactccggaatcgccctccaggccatggacaactcgcacgttgctctagtttccatgctactccgtgccgagggcttctctccctaccgctgcgatcgtaacatcgccctcggtatcaacttgctctccctgaccaaggtcctccgcgccgcccagaatgaagacatcctgaccctcaaggctgaggactcgcccgattccgtcaacttgatgttcgagagtccagacacagaccgactgaccgagtatgacatcaaactcatggatattgaccaggagcatctggccatccctgagactgagtactccgccagcgtggagatgccttctgctgagttccagcgcatctgcagagatctcaacgcgatgtccgagtcaggtaagtaaattttcccccgaggcatactcaaacccggtttgcagacacacagatcctctcgtgctaatttcttgcgtagtcgtgatcgaggccagcaaggagggtgtcaagttctcctgccagggtgatatcggtaatggatccgtcaccatccgccaacacaccaacgtcgacaagccagagcagaacgtcgtcattaacctctccgaacccgtcgccctgaccttctccctcaagtacctcgtcaacttctgcaaggcttccaacctgtcttcatctgtcgtgctgcacctctctgatgaagtgcctctgcttgtggagtacggtctgggaagtggccacctgcgattctacctcgctcctaaggtaagttcttgattgttccaaggtcgacatcatggaaaccgagctaatgtgggggtttaacacagatcggcgacgaagactaaacgaatcatccagtggttcgaggggatatgggcaatgttaaaaatgaagctcgatgataatggagagaacttggaggaaaatgttctttcatacatccctgacgacaaggggttttacaagatgttcacgataatttacacattcagcggtcgaggtttcgatctcgcaaatttttccaaacacgcatctttcacctagaatttcaaagatttctaacttcgctacaagtacggattaaaagatgatatcttagatatttcaccgaccattaggccagcggaaagatgtattttattgtgtccataattccgaagaaagccccgacaaacccaaagccaaacccagcgaccgaaacctaacgagcccgcaggcaaaggaccctaaggaacctcgcaaggatggtccacaaccccactaatcagcaaggtcgccaaattaaaacgcttctcagacacccccaacaaaaaaaagaggaggggaagcaagaactgacctgaaaaaaaaaagtgaagcgccatccccaccagaatgatcggaatcgaatgataccatccgcccctccgaagagaagacagaacaaggtatgctgcgtattgcactaaagtgtcatcacacacaatctccgcaccgactctcccaagggcttaggggcaagccccatccgcccgatgtttctgatgtcaagtgcaagtgtgggtaagaagtgatctaggatcacaccaggccctcacgggcaggaccggcgccgacgcgcgaaaacgaacgacggcgcgggtcggggtttgaagattcctccgaatttctcatttgcaaggggtctcgcggctctgggcaggacccagtgctgcgaggacgggctgtgaagctcgccgtgtgtagcaaagaaacgcagcattggtggggatggcgcttgaggaagggaaatttggcgtggagaacggtttgcgggttttatatcgctgtcacgtgggatgagtcatctgtgcgcttgtcccgtttgggaaggtatagggcatccagtgttgtgagttgggttagttgcgctacgaggtttggatggagtgcttcttttaacatcaagttgaatgcaatgattctaattagctgattctcagcaatttgtggctaagtctagagtacactctcggtttaggtcgaacgatctgctgcttgtgctagatttcctcgaaagctcgaacgatatatgtctttccttgaacttctactttctcccccggtgttctccaagatcccaccccctctccatcaaatccgaccaccatcgaaggcaaagagcccgcagcttcgccaaccaaatacttctcattccacccggattcccattcttcccttctggcactaacatcagcgccagacttcttcacaaccagatcaccagatggagtcttctgtcgcgagtgaatctgcgtctggcttagtgccaaatacgtgccccagatgcgaccgataaaagtcttgctaacagtcacctctccttctccactgccgagatctccatcatccgactccagcacccacgaaatacctttattaggtccttctgggccctctctgaacggcaactcccgccatacctcctcatattccttgtcgggtgcgccaggaagatcatgacgaggcatagacccgacctcgagatcatcaccgttcggcaaggggaaaaagctcccacaatcagcaatttcaaacgcattgtgagagtcaagctcatgggagaaagtcacccgcactattgagttggttaaaaagtagttcatattcgtttcgctgaatgcaatggcatcctttggataagggacttacacggctcctgaccctccacgatcctctgcccagcaatcgcccagtctattttgcctgttgccgtttcgatccgcagatcaacgtaccagtccttcacggacatcacaattgtatcggttgtttcctcggccggtgttgtgagccatcggaacgagattcgcttggagaagcgacaggtggactggttaggtttgttgaccatattgttggctttcgctggatgttggattgttatggtaggaattgcctgtttctgtggctatattagatggtaggcgggagctctgctaaacgagatgtctagataggtatgtgacaagagccagattgggaaggttgaagagaatgcccagccatttggttatcttcccctcacaccccgcattcccctccagggacattctcctcacggacattgccgttaattatgatcggttatcaaattggaagattgggaaattgatatcaaaatttgatggttttacattgaattctgggtccatggcaatctttcaatacacaaaaactgggtctcatgtcactctatagctgtaaagaccagcttgcagctctgccccttgggcctcgaagagatgatctgatcatccagcttcatagaagcagtcatatccgaggccaccgtcgtccgataacgagaatacacttcccgaagcagtgtcttcatctcaacaagcgcaagactaaccagtatcagccatcagcaccagccaaccagggcacaaggaagacaactcactttttccccgtacaccctctcccacctgtagcaaacgaaaagaatagcctattcctctcagcagccccctcttcaacaagccaccgatcaggattgaaacgatcaggctcagggaagacactctcactcgtccgatgcaccgaataaggctggcaactaacgatagtatgctctggaacgaagaacccgtcgatctcccttccaccagcaggtacatagcgaggcagtgacatcggaataggcggcgcacaccgcagcgcctctttaatgacagcatcgagatacacatagctatccaagggtgcattgacaggcgcagcggtaagctctttgtaaaggttgtgttggaaatagagattgtgaggttgtgagagctcccacattaagaaacacaggccatcccccgttgtgtcgatgccggccgccatgtggtctttgcattctgcggcggcttgcattagttccaggttagattctttgcgcttgagtttttccattaaggagtagtcgtcgagctcgatttgggcggccatgtctatgacatattggtttgcttttggggcgctgcgggcatggaggaactttgggaaataaggtgataataaagggagatagtactctaggaggttttctgtttgccgttttagtatttatcaccagaacatggaaatcgggcagtgcatactttggagactttgatgataggtcagttcgtgcatgatctcgaagtcttcggctacattgagagatctcaggccgccggggctgaacatgaaatgcgtaacgcagtccagggcatagcagtgaagcaaagactggaagggttagcatttctcatgttggatgctttaatataatgacaacccacgtaaacatccacactcttttggccaccctcgacacacttagatacaaacgtcatggcccgttcgtggataagagccatgggtttttctttcatgatattggtcatggcgtatctatcggcaaagatgcgttttcttttgctgtgctggtgtatattagcactcgaatgttttatttctattagaaatatgtacctcgtccttcaataaagtagaaaacattgtcctaagtctttgtattagtggctgccagctatttctccggtgcaaaggcttacttgatcttgaactgcctgaaaagatcatagtactcggtcttgtcatacccactcccccccgaagcatagatctctttaatcgcatccaggctggtaaacgatagttcattgagactcagccggacgacaggaccatagatcttgtgcaagcggtgaattgactctcgtcgattggcagtgaactcctgatacttaagccacaaacttgtaaatcgagtataccacggacccggaattgtagacaggggcgagaagaatccgcgtatgactatatacccacaaaggatgatagccccggcccacagagacagcatgttgtcgtatcagagagctcctgggtgatgaaaagtttctcttgaagaaggccgaatgtgcaatcctacgcttatttataccatagatctgattgaagcatcaataattcccattagataatagacataactttggagatttgatagtctttgcttcaacagttaggatttgccgatatcatcgttatcggagtgcggggaaatgcgaacagacttgggtttgggttgcgataagatttcagactttaaaccaaaaagggaaatctgaggagatggtaggatttgaaaaaaagaaaggttattcccaatgaatgtcacttgatagttatattgtagctaaacagccttgtcccgatcttgactgggattcatctctagaacgtatggcaggggagataaactgtttatacggcagacgggggaagatgaatgcaaaagattatgccgtagccgatcacttaagacattggatatctctaactgcattcaaagattcactggacagcccatatgtcaccaagcaacctctcaaacacaagtttatggctgcagccgaagccaagatcaaattcacaaaacagtttgaaccaatttcatgctgatggttgaaagctacatatacaatgatattattatatggagtagtaatcaatcaacggtgcattaagttacaataatagcctagtgatgggggtaagggtgaactatgacatcacatagattccctttacttgaataccataaatagaactagacttgtgccagtgcctcgttgactatcaacaacaacatagtcgagagctggatcttctatagtggagagcttcctaaatttggtgtcgcagtattgagagagctagtatcgattttatcattcattacaaacgggctgcagtcctaaaaagacaccaccaggttaacgagttggatatgctcgatcatgagcatataatctttgaaatatgagacctcaaaagtaaaaggtcaagacctgcattccatttcattgttgggcttgtctttgccgagataccctgctccggcggcctttccgttgatcggatccgacgctagatgaccgatccaatgtctcacttctaagggttcttagtgggctgaatgggggttttctagatgttgccgatactccaccaggttagaaacacgtccatggattttgtcaggcaattctggagatgtattggagaagactatggttatcggggtggattcgcataaatgcttcgattggcgatgtgttggcgttgatcaacacatggtttatgtatcgtactctacacaaattccttggtctgaatctgggtatttcgaacaatgatggagcctttagccggctgtacctaatcggaagaaagtggaccttctcgacgtaaggaatcattcgcacatcatggccgatcccggtgcatagtgctttagagatcctgcgaaagcacctaggttccgaagttctaggccgcggagagtgaaagtgaggaccaaaatagagccatggaaatgaaagtaagatcaaacagggatgatgtaattatatttcagtaccgaggtacagctgtacacacgcacccgcatgaaccaaggatgacttggtcaggggccatggttcagacaatctttaaactgcctcagccacttttgtatcagccacattagtgagatcgtattccagctctcatatgttattacaacatacagcatgcttcacagccttacctccacattattttctgcggataggactcattgtggcttagactaactaattgacaggccggtgtcacaggttaaattggcctgagatcagggtcttacccgtggactccagccctgggctactagcacgattaagtaagccaaatagaacacctgcctagtgggcccggcgggcatccgcccgggcgtcgtcgatagcctaaggcgttgaaacagtcgaataaaggattctctctttaccaattagacgacccaactagaagagtacaatatatgtaagacacacaaaagcaaaagaagaaaaaaaaacaaaagagaatcctaccaagtacggagtaaaataaaaaaagtctggactcgactaagtttggtacctgtcgcatgtcgatggggctactccactgccgattcaggagaaaaaaggcgttggaatgcagaaatagtgtggtggctttgtccgggttggagaaacagcttttcagggactctacggtgcatctagaatgtttgtagtaagcagagtcccgacttgtggttattccgtacatagtgtacttcgtacactccgtaggagcctgcatactgcgtatgtgtgacccgccccatggtatgtggacaactttggttgaaccccagatgtgcccctactttctctcccgtctcgaatccggccttttttccttcttcaccttttcttttttgtcactcgttcgatatttcctccctttttatttcaagggttgaatcagctgtacggtcgctgccacaacgcattccctcgattccccgcctcacaattcggaactctgcgggataaaaaaaaaacacaaactacaacatacggaataatacctagagaaatcaccgtctatctttaattcgactcaactggtttgagctgtctgcttgacagtcggatgcccctgtcgaggctttcctgcgtctaatcacacgtctcctgacgaatcctggcttgggccaaccaaattgccaagccacagaagcacacgagcctccgttgtgttttaatttgcccttcccccccgtgtcgggcctatttcccaccggtcttataaagcgaacgccaccgtcaggtggttacaccgtcgccgtgtctttcactaaccatcccgccgacctgagctccacgacggagcctctcggcaagattccttcacacgggtcgcgcgcctctctcctgggggggtcttttgatcctgcctttcgacgaggtcagggagggttccgcgcacgagagggatactctaatgtcactcctgtgacccatagccccaggatgtatctcccaaatacatattggacatggtcctttgcgatcgtcacattcgtccaaacaatcgtgacactcagccttgaaaggtatgaaactccaccgatgcgaacatgggaaatcaacattaacgtcgccattctttctagttacatcttcgcgaattttcaattgcaagaactcccaaacaacagccccgcctcgaaaaccatccctactttcctcgccctctatggcttcggtttcctctacgaacttgtgctggtatacgatgctctgcggatgaagaatacaattcaggtcatcggactgtgtatctgcaatgttggtctcctgatttacggcgctgttcaagtgaagcaaattcgagaggccgtctccaccttggccttgatgaatatgatcagtccggttgtctgggcccagtcggagccgttcctgatcatcattccgtgcatcgtggcattagggacattactgatcactttcgtcgcttataagctgtacgacgagtttgcatggacaatctacaagcatatcagtgctgatctgcaaatgaagcgtcgctatctcacctaccaggtttgtgttccattcgacttccccatcagcaacacagctaaccggtcactaatcagatctatatcgctctcttgaaattcgatttcttcttcttcctgggctttactgtccagttcctcgtcttggtctcctcgactagcatggacgttgaatttgcgcttacggtggctgccatccccgtgaccattatcattctggtctgtggcgcctggtttgtgcgacgagaaaccatgactggcatgatcatcatcattgtaagtcgaataccagcaacgttgattcaccttctaacagtcttatccagctcctcttattcgccgcgatggggtatttctgcttcaagctattccgaatgtactccccgcagacttacttcaaatacctgcccgctcgaccatcgatgaccttcttcgccgtcatcaccttatttttgattgtgatcactatcgtcaacgcctgcatgtgcgtccacaacttcaaccgcggtttgaagccccacatcaacaagaagaagaacaaggaagcagaaaagacaaccgagctctcttcgaatcttacccaaataccatcacggatgatgatcgactgatcacccggttcgcaaaagggtgctctataagtaattttctggggcgttgaattttggagcgtcctgtctttttttaatctgcgaacttcgtgtccgtgtggacaccttgaatttagcctgatctctttgtgcatttttctttctttttcctgggctttcggctcagcatgatacctcatttccgtcgaatctgctctgtccaccatctcccattcttcctgactctgagctgtcaaaaatttcctgtcattctattttccttggttccctttacatgttcatatccataccccataccccatacccctgcacgagtgcaccgacggcgttatctgaatgatttgattcccggaggtgtcctccatgtcttacgacagccatcgatgctttttccgatgaatgtgaattagtctttctcattagttcaatggacttaaagcacgtgaatggtattttagtagctatatcgatagaattgaactttctacctccgtgtcatacatactttgtacataacatagactgaggtcagttgttcactcgttaaagaaggtgctagttaccccgtacatattgtagcaatatgcgccgagttattctgattggtggatatttttgtactgtaaatactggtaattatcacctaattcgcttccaactgccggggttgacatgtcaaatacggtattaccccgaaaaccgcgatcgtggcctcaactccgcaaacctcctttcagaccatctcaggctcctccttccctttcttcttgaactgcatttccatctctcttttaatctctttttcttttcctttacactcttctacacgcaattaatcacaatggtaagttcatctccccggacccgaaccccatcaaccacccatccgacgatcaagccagcttgccccatccaccgccaacccattgcgagccctcttgcgaatttctcaatcccacaattaacataatgcaccactaggcctccccccgcccagcgtctcccctcacctcaggcgccgagtccggccctgactcaaagtcaggtgccgccgcagccactggcaactccgtcggccgtccttcctctccctctactcccggcggtcctcgtgctgccatgcgccgccgtgccaccgctgaccataaggagaccctgcgcaatgcccgtcccagctccactcgctctgctggcgccggtggctcgtccggcaccatgctcaagttgtacaccgacgagagccccggtctgcgcgttgaccccgttgttgtcctggttctgagtctaggattcattttctcggttgttggtctgcacggtaaggaatcaccactgatgatgtgaatgtttggggtcattgtttgattggttgctgatcgttttcttctctctagtcatcgccaagatcacccgcaagttctccgcttaagcacttgatcagcctcaattgcgcagttgacatcccgttggattttcgcgtacggtctatctatctatctcgggcgttgactgcgcgctccccgacctcgaatcctcctcatcttaccgcctcatttcccgactcctataccccgtgacccttgggccatttctcgttgtggcgctggaaccaaatcaacccttccgaaacaactggcgtgattccgttttgttttcattttgatgtgtatgtggtgttttcatttgcgttgaaaaagagagttactcaacgacctatctgctgtataggtcattctagatagaaccggcctgttcgtgtctccgtcttgactttctattttacggccattggctcgtttcctagcgatatcaagcgctggaatatgccgtggatgtgctagttcggaccgaaacatggtggtatttgttctatccggacgcttgtctgtacaatataaagaattgattgaatctgttcctagaattagacctgattttctagtggctgaacatgcatataaaccaccaactcttgcttcacgtcattccggtgtcacaaaaattgcagaacccgcaaacccgtcattttggaactcgtctagagcttctagttgttttctgtagacccaaatgccttcgtttcataccaagggatcccaataagcttctctcgaccgatcaattgcttcattgctattgactgtgtagttgataatgcacttgacaattcgttcatccagatcatccagatagcgacgccgacaaacagcttcgcagactttgcaatgtttagcataacgtgcatatgacttggaattggaggtatcacacgcaccggacatcgcatagtatagaactattatgggatttcaaacacctcccaggatcaggccaacatcccctataaacctattggtaatcatgcataatcctaggagagctgctctatagaatgaagaaaggcagcggccttaggggacatggtgaaaccatcagcagcttactgcaccagaggcaactcctcgccacaattcgattcgttttcagtggagccacatcgaagttggtctctgaacgccgggattgacccgttccacctcaggttttacatctgcttaacttgatgacaatgaaagggtagcgacatgaatgtaaggacaaaagtcatgaatatatatagctgagcggaggcaaggacgaacttttattctggggaacattagggttttataggaatggctaacaaaggaatgcgaacggaccaggcaatcatggagcctataatctatggatttcaataacctggactgcagtcattgtacaaccctctccatcgcctttctatcactatacccccttccccttcaatatggcgtccatccatctaggatatagcagcgggttgtagttggactatagctctcgggaaaaaaggtcaagaggaacctcaaaatccatagtgtctgcaagaatcggagctctagaccatgccacaatcacccaaagccagttcccagacgatttagatttgtttaagagttgataacaaccttatctcttaggggtcaatgcatatcaggtggggtaccttggggtctcgaattaagctacgattgaatatggtcaccttgtactctttttcgctggtcaaagattagatgtaggttgtactatagagcagatatgtatatatcctccttttacacctgatttcatcgaatacaaattgtattcctgatggcaccatagttatatactttgtaccaggtcctgaagctcgtgaaacagaaaaaagatatgtatatcttcaaacttcaaacttcaagattcaacgattagataaataaacaagcatttaacaggtctttgacttggtggcacaatctaggcaggacttgaggataagcagtctatacccccgaagtcgggagtatgatatactatgatgaatatgataacggacttgattcacgcttcaagaaaagtttgattgagagcaactaatcgaggcaatataatgttgacagaatttaaagtgaacgtgggggagatagtggatcatatacggagtaataaagtaataagaatgagtaaccttggaacctttcactgccaagcatccttggagccccgggataccccgatatcccctaaacatctgcgatccgtttacatcggcagttggcactggtaaatgtcaaacgtcgcgtcgaacagcgcgagtttgccgactcgtaaactcttatcttacatgttctccagccaatcacagccacccagccatatgtacccttgacggtaactgataacagtcagcgccaaccaatgaccgacgacatgtataccctggtcaaaaccttcatgcttcacatcagagtgactctttgaaatccccgcgcgagtgctccattgtgatgttgatcccctaactctagtggcgtacttagacggtccatatccctactatgcgcgccatggtattacgagagcatgttgtccttatctggcaatcagaatggagcatccctatctaagcttagggtcagggatcgtcatgctatactcccgtaccccagtgcgaattcggagctgggggtccataccatgcttctgatgctatgtgcccggacctatatgaggttgctatcctcccggtctgggaagcttgatatcccatctgccaagtcagggttggaaagttatacaaggcgtactttccatattaactggagcattagtcgctgactcccaattcaaggcaccttgccatctttcatatttctgttgtcataaaccctcttgatattcacgtctacgacatgtcgtccgacggggttattttcacagcgcctttgtctcagagctttggatatggaattatcttaggcctaggctttgcctttgccctactgatgatcttcattacttgggccttgaaacggtgcgtctctatgccttcatcgatatcacccacataagctgacaaaatgcatccatacagctatcagaatgaagtccaaacatccgagatgttctcaactgcaggccggtccgtcaaatcaggactggttgcagccgccgttgttagtagttggacatgggctgcaactcttctccagtcatctgcagtcgcatacaaatacggtgtctctggtccatttttctacgcatcaggttagttccggcggtatgcgaatgatctgaaaagctctatatctaacagtatgtgtataggcgccactgtccagattctcctattcgcaacactagctatcgagctgaaacgccgtgcgccgaacgcgcacactttcttggaagtcatccacgctcgctatggaaccgtcgtgcacgtagttttcatagttttctgcttgatgaccaacattctggttactgcgatgctgctcaccggtggctcggccgtgatgacatccttgactggagtgcccactgcggcagcctgcttcctgctcccaattggcgtggtactatacaccctcttcggtggtattaaggctacttttatcacagattacttacacaccgtggtaatcctggtcgtcatcttcctcttcgccttctccgcttatgccacaaatgccgagctaggatctccatcaaaggtgtatgacgcgctagttgcagcctcccagcgtcaccctgttgagggtaatgcggaaggcagctatctgactatgcgctctaaggagggtggcgtcttctgggtcatcaacatcgttggaaactttggcacggtcttcttagacaacggctactataacaaggctatcgccgccagtcccgtccatgcattcccaggatacgtcattggcggcatctgctggttcgcaattccctggctatgcgcaagcacgatgggcctctccgcactggcactagagggcacgcagcgcatgagctccagcgacgtgagcgccgggctagtgctcccctttgcagcagtcaagctgctcggctatagcggtgccgtcgccacaacattgatgatcttcatggccgtgacatctgcgttctcagcgcagctgattgccgtctcttcgatcttcacctacgatatctacgcggcctacatcaacccaagcgccaagggcaagagacttgtctggatctcgcacatgtcctgcattgtgtactcaatcatcatggcgggctttgcgacgggtctctactacgccggaatcggcatgggatacctctacctgctgatgggcgtgatcatctcctccgctgtcttcccaggagccatgacccttctttggaagggccagaaccgaatcgcagcagccctatcaccgcccctcggtctggcagtttctctcattgcctggctagtgaccgcaaagaagcaattcggaaccctaaccgtcgatagcactggctccaagtaagcattcctttctcaacatccatactgcaaacccaaacctaacaaaccgccacagttaccccatgctagccggcaatgtcgccgcccttctcagcccactagtcttcgtcccagtcttcacctacatcttcggcccacaaaactatgactacgaatccatgcgcgctatccgcaaagtcgacgacacagaagtcgccgccgccgctcatgtcgacctcgaactagttcccggcgagatgggccccacgcaagatgagagcgaagaagaaacacgcctgctcaaccgctcggcattctacgcgcgcacgctgacagtctttatggcacttgcattcctgatcctctggccgatcccgatgtatgggtcttcgtatgtgttcagcaagaagttctttacgggatgggtggttgttggaattatttggttgttctgtaccctgtttggtgttgtggtgttcccgttatacgagggtcgcgcgagtattgtacgtgtagtgcggatgatgtcgcttgatctggtggggaagaagcccaaggtttatcgaggaacgaagggcggtgccgatgatgtggctacgccttctgggctggcgacgccgacggatacgcttggagaaaaggataagcagaccttggagagggaggtttgaggcttttcctggtgctatctttactggttcttttctctgtgcctttatcttggcttaatatcttgtttacggctatttataccctcctactactgaatctcaatttcaacttcatgtgctttattattatgtgctccaatcatggtagcaagtgagcattttataacaaccttctatattcttatgaggaatagaacatgctacgccgatcgaatgggcagttcaaaattcaatagcaaaaaaaccaaaaaaaaaatacagttacccaacgccaagggtaaacccacgatattaagccggaatatgtgtctcctgataagcccttcttctgcctcacaatcccgcaataattgctgcatccttatgcctagtagaatttgaacattggaaactcatttgtatccaagtccaccctgtgcttgaggtggaggctgcagagggggctgttgctgccagcctccctggacctggggaggcggctgaatgccgtattgcatgcctggcggaggtcgcgtgtcaggcgtgatatcgggccggtcactgatgtaatcgctattagtataactatcatttgaatatatttgggcaatgcttaccgtaggtcttgggtgtaacggcatgtgtgacattggacctcctatatagtacgttaacgatagagtcaaaaggtgattgatacaggcatatttaccttgtacttgtgcgtagcaaggggaatcactggctgtagcgaggtaaaggttagatatcttgagctgttcgtcaagacaatattctggcgattcataacttacaatgaagcagacggtgaaaaacggccttgaagaattattagtcaagttcaaattattctggtcaggtcctatgggccagaaacataccatcgggtgatgcagtaaccattccaatgttggcctagaagcggagaatcaataacagggccgatagaccactgacgtcagaacttacagttgtagcagtatgcacgaacattctcatagccctcgagctgagacgagaactctgtattcgtggtcagtatctttattcaatacgactgagcaacgtcgacagcacggatacccgtcagggacagggtccactctggtttctggatcgtggggtaggaagacttaccatgtgttccaaacgtgatacagaaagccatggtaattgtgagatatggagaagttggcacacaacgaccgaagagaatcaacagagagttgagaggctacttgcgattgaaagtcgattagagacgaaggcagcggcattgggggtgtggcgctgtggcttggcgggcttggcaggtaacacgtgatgtcagatgtagtggtgcatgattggccaagtgcccctgtataaaaggcacatgtgattattgattccagcagggacccgttgactatcagtgattatacatgtacatatgtacattttagtaaattgtctgaagagtctgcagtttttacctaggacctaacctcgagcaatactttcttttggtgttttacgtgttttgggcagatgcgcttaattcactaatggctattcaccataggataacagccccataaaccaaatattagacaaaagagtcgcttgaaaacacatttctccggatatcacctccccatcggtgtagaatgccgagcctagacacatcaatcacatttattgggtcttgaagagcagaattgcgcagtgtccgaggtagaagtagatgaagtgcttagtctctgttgaacacatgattagtatctgattatcagcataatggttctagtatccacaaaccatgggtaacgaagcttccaaagttacgaccaacaacgcagtgccaggtggcgcccttgcgggagtcgaactaatgtatggggttagagatattatcaggcggggtagaatcggggtagaatcggcgtacctctttcttgatatactgggcaatatcctgtaactggttattatctaattcatattggggatgggatttgaggagtgcgtgtaccttttcaactctgaacttctccatggcctcaatggctggggggtaggttagctttgtttatctagggcgctctcgaagtttcataccgagggcaatagcctcctgctgcatatcctcggtctaaaaattgtgtcagaatcaattggctatcgtagtttcgcatgagtgtccttaccatgtccacagacttaatctgcgctgcacggagcgtttagcacttgtcactggactcacgaaggataaacttaccctccataggctccttcttttcagctgggggaagtgccattgtgagtgattcctgtatcaaaaaaacttcgaagggggggtttaggtggtgcgccaaaaaagagacttggtagcgtaatctcgcgataacgtacgttattgccggtggacaagccacaccgcctgcccgccagaccgcccgcggcactatgaaagaagaaaaaaagtttttctcgtagaaacttcgagtcttcacactactcaccacaaaaacccaaaatggagagcactagagtgttcgtgggtggtctcccaccgacatgctctaatgatcagctaaagaaacattttgcaactcgctttcaagtcaccgatgctcatgtcctacctaaacgtaggatggggttcgtcggcttcaaaagccatgaagcagccctgcaagctgtgaagcacttcaacaagacatacatgaagatgtcgaagatcgctgtagacatcgctcgtccggtatgtcgattctcagctctttttgcttcagccaccctactttcgcctgtgcacgctgaccaattaaggtggtcttgagactgacccgtattattgcagattgactcaaatgacgctgaggatgcccaccccacacgacgacgtgatgccacgaatgataatgatgcatcgttggataacaacctcaagcgcaagagggacggcgagaacaaatcacaggaccctaagctacaagagtacctctctctgatgggatcatcatcgaagactcggacatgggccaacgatgatgatatgatcaagccgtcagtggacacggttcccgttattaaccaacccgcgcaggaagaagagcagattcaggacctgccttcacacccaaaaaaggcaaagacagaaaaaccttccacggtagcaacgcctgagcagcctgagcccatggtaattgacaagattgaagaacaggaggctcaagaaacactagaacaggacaactctgcggagcctgaagaggagactagacctgtatctgatgcagattggctacggtcaaagacgagtcgtttgttgggccttctcgatgaggaagaacaagatgagtttgatcaacacaaggccgccgcaccgactactgcgccgatcaaagctcattcaccaccttcctcgtctggcgatgagtcgcctcagcgtgacgaagaatcgcgcactgcggccattgagaaaattgcgcccaacacgactgacgttgacagcatcaccgaggcaacgccggaagatccgaatatcgatcttattcggaaatcggcccgtttattcctccggaatcttgcctatgacaccacggaatctgatctacaaccgatttttgaacgctttggaaagattgaggaggttagtacttacctttttttgctttctcaaccctgccccgcctttcccccagtgcggcagactggctcacagcctgtttgttacgagtgctcgtatgatgattttcccgatagggacatccgatgcaaattgcaaatgatgttaccaggacaagatattttagtagatgcttcttgactatctgaaagagccaactcaacccacttttccacatttacacattatattcaatgaccttgagtactaattgaatatagattcacgttgcttttgacacacgctccacaactagtaaaggctttgcttatgtgcaatactcgcatgctgatgcggccattgaggcctaccagacccttgatggcaagcatttccagggtcgtctgctccacatcttgcctgcttctgcgaaaaagacctacaagattgacgaatacgaattgtcaaagcttcctctgaagaagcagagggagatcaagcgaaaacaaaacgcctctggatcgtcatttagttggaactccctatacatgaatgtgagtttacctcttaccaccaccaatcaaaaggttgagactaatttcgctacaggccgatgctgtgatgtcatcagtggcctcaaggctcggagtctccaaatctgaactgcttgatcccacttcttcagaagccgccgtcaagcaagcacatgctgaaacgcatgtgattcaagaaactaaagcctactttgcttcgaatggagtaaatattgatgctttcaagcagcgcgaacgtgggaacacggctattttggtcaagaacttctcatatggtgtcacgtcggcagagctcaggagtctgttcgatccatatggcaagattatccgactcttgatgccgccaagtggcactattgctatcgtgcaatttgcgcagcctgacgaggcccagaaggctttcaagggcatggcataccgcaagataggtgattctatcttgttcctggagaaagcaccgaagaatttgtttgatggttcagcagctccacccacacttgctccagagactcggggcaaggatcaaggtttctcaactgcagacacatttgccgcagatgaacctgatgacagcgtagcaactacgacactcttcgtaaaaaacctgaatttctcgaccacaaatgagaagttcctggaagtgtttcgatctctggatggctttatcactggtcgcatcaagaccaaacctgatcccaagcgaccagggcagaccctcagcatgggattcggctttgcggatttcaaaaccaagggtcaagcccaggctgctctttcagctatgaacggctacaagttggatcagcacgagcttctcatccgcgcatcccataaaggcaaggatgccgccgaggagcggaggcgcgaagataccgcgaagaaggttgcagcgcggagaaccaaaatcatcatcaagaacttgccgttccaggccacgaagaaggacatcagatctctcttcggggcatatggacaacttcggtctgtgcgtgttccccagaagttcgatcatactgctcgtggtttcggttttgcagactttgtaagcgctcgcgaagcagaaaatgccatggacgcgttgaaaaacacgcatctcctggggagacgattggttttggagttcgtgaacgaggaggccgtcgatcccgaggaggagctcgcgcgcctagagaagaaggtaggagagcagatggacagggtcaaacttcaacagcttactactggcgccgggcgcaagaaatttactgtaggagggcaggaggaagagtgaagccttcgttccttctccctttgacaaggacacggccatggattggctcgttgacatcccttgcagggaaaaaaggtggattaatgtcccatgtacgattacttgcatactaccatagctacaatgtggaaataaaaagataccccgaatactgttgaacacgttctttgcagctgtcaatttccctgcagtcccgtcctcgtgcgtctcgtgccctcttgatccaggcgtaaccgtaaccctactttaccttactgtgcaacacctttcttttctaccccacaacttcagctaaaccgccttggatcgcagggtcattttacctagcttagcttactcttttgatggtacgcaggactatcatcaacagagatcagccaagcctgcattccggtggtgatgtctggcggtggtcgagcattccacgtcccgtgccagaagacaatgtagttggaccatcaacattcctgcaacgccatgattgccactgattattgcgatcttttgttgatgcaggtccgagcgatggatgttcaaggtcacttcgcgctgcacaaaatctccgacccactcatcactggttcgtgctgctgagcatcccttgcatcctagacaacttccttcatatcgagccctgtcttgactcctgatttgctgcggcagggtcggcttgccgtcgtcctttggttctctgctctccacacagcgcgcgcaggccaggatcgggacctgcccaggagtatggacaaggcgttcgagggacgtaggccaggcaaagaagacctggcggaacaatgtcgctactggggctacagtacccctctccaaaggggagtaatggttccatataaacaccatcttgctcgctcccacattctctttcccaggttcttacattctcttgacatcttgcgttcttgggtcgttgtttgtgactgagctgcgttctttgccaggcagtaagcatttgacggtgcctctcagttcccctcctcattggaatctgtcattcttttcgagagcccgtccttggttccctccccatggctactgactggcaacccgagtgccttgtcgctcagaaccagccgtcactggatcctgtgggagctcattctgatcgagctctgcagaataccactgggaatgtccagtcttattcagaccaattggctcatgctggtgtcactgctcgcgatgatcagtttcatcaatatagcttcaagtatcctcatggccctcatcctcaacccttgtcagcacctggcttgcatcaacagcatgtagcggctcggcttcatcaacggaagcttcgcaggcttcactcggttggacccaactctcagtcccgccgggcacaaagcagctatctcaagtctcagaaatacatggagtaccgacgtcgccctcgtcgtgatactggaaaagatggagagccagtgtggtctgatgaattggaagacgcttttcagcagggtaggttcataccaccatagtgatagatgaaccagaggctaacaaccgatttcagctctcgaagcaaaccctcccatgggtcgaagaaagtggtccgaacgtggcaagtcatatggccgcaacgagctgattgctgagtatatcttcaagttgactggcaagcggaggacacgcaagcaggtgtcaagccatctgcaggtcctcgactctttcttgaagggcgatcccgattgtgagttctcaaatatgaaagatgtgtatatcttctttttaacacagtatgctaggggagcgacttgtccgtgagccagcattagaacgatcatcgagtgttcatggctcagcacctgctccgaaatggagaacggcagtagagcacccctcgggatctagccactacggcagccacacacacccttcataccatgaccatatgagatctatgcaaccatatgctggagatctcccaccgccacactatacgcttgggtccaacatgcaggagactgctgctagcaccattcatggctttagcttcgacatgtgggtcagcgctcctcagcaggccaatcgcatcgacaaggcattgcatgcatacacccgtctgcagggtgatctgcaccaccccgttgcaccccccatgcctcttgagcatgtgaacgggtggcggtcttctttcccccaactggcttctatggtggatgacgtcaacaatcccctggattgcgatatcatcttgttagaagtgaaccttgagctaatgaccgacttccctcctactggctcacgactgggaatccagctcgatcttgactacggtcaccctagtgctggcgatgttttgggagtcagccagatggacaactggacctgcagcacgcatatctaccaagatagccagaagctcctagagacttaccacgacctacccaagacacagtcaactaaggtcaagcccctcttcgaatcatcttggtgggctaagctgttcactcagttgactcaagagaaacgtatagccgaggactcaggaaacccccaagctgctcgtgacgctgatgaccatgcccgtcaattcttccgctcattgtctgcagtgcaagagatccgtgccacctcgcccagctcctgccgtctgtctaaccaataccaaggccatcacggcgatgagagcaagcgcatggccgttctggcctggaagttccgacaaaccaggcctggcgaagttggcaccaccacttggagacgactaataccggcaccggaccggactacaaccaacagcccgcgcccagcctccgcggtcgatcgagttcctctctctctggattccatccttctcaacaaaccatcccaccagggtatttaccaagcccctcatcctcacgacctcatccaccaccccagccaatcccaatcgcaatggcccatgtaccaatcacctcatgacaacgtgtctaatctctataatccctccggccatctggacttcatgtcatccatcagcaaagccgaagatggactcaatgataaaatcgccgtcacctcggtgctggactccttctccgccagcctcgcacccgagagcatctcatccacaagtctccacggctccagcggtgcacccgtcatgctcaacgtgcatgacctaccactcacccacccagggatgggctacacaatgggccacgaaacatcacattacgtgccatcccaacaccacagcgtgaatatgcacgacagcaacagcgtgctacacggcttcttcggctctcacacgcaaccgcttgatgacctcagccacggccatgggtcgtggggtacgcactccacatccatacccggagacgtcggcgccggcagctaccatatcccttatcaggccgagcaccatggacctgtctcgcgcgagtcgcagcaaccacaccagttcgacggcctcttgccatcggaggacctaatggataagatcgtcgggcgcatgtccaatggttccggcatgcatggggcgggccccgatgcgggctacgataacgccactgtggatgcggtataacgacatattttacaaaaactaaagtaattataatcattctgggagtggtcttttgaaattttctattcctctttctgtctttctttgtgaatgtcttagctagcgcccggagaaagaatactttctacaccaatcacttacttctatttacattgcaatttccctcggctgaactcctctcatcagccactttagccgcaaaacagcacattttaggaccaactgaggtagattcgatttagcctgaacctttaaattttgtgtatattttcaatattactaggtggggtcctatatatacccctctatgccccaatttcttttttattttgttctcttgagatctcgttttcacaatggttgcccctactgtcaagcttaacagcggctatgagatgcccatcgtgggcttcggcctctggaaggtcaacaaagacacgtgtgccgaccagatatacaatgccatcaaggctggttaccgtctcttcgacggtgcctgcggtacattcactctctccaaatcaagccctaattgatactaacactattgattccagactacggtaacgaagtcgaagccggtcagggtgtagcccgcgccatcaaggacggtttagtcaagcgcgaggagctcttcattgtctccaagctctggtgcagctttcacgaggccgacaaggtcgagcccatcacgcgcaagcagctcgccgactggggcatcgactacttcgatctttacatcgtgcacttccccgttgctgtgaagtatctcgatccatcagtgcgctaccctccgggctggaccaccgccgaaggcaagatcgagttcgccaacgcaccgatccacgaaacatggggtgcgatggagactctcgttgacaagaagctggttcgcagcatcggtgttagcaatttcagcgcccagctgctgatggatctgcttcgctacgcccgcattcgccccgccaccctccagatcgagcatcacccctacctcacccagacccgtctcgtcgactacgcccagaagcagggcatcactgttactgcttactcttctttcggacctctgagcttcctcgagcttgaccttaagcatgctaaggatactccgttgctctttgaccatactactatcgccaccattgccgagaagcacggccgtacccctgcccaggtcttgttgcgctggtctactcagcgcaatatcgctgttattcctaagagcaatgatcctactcgcctcgctcagaacttgaccgtcactgatttcgaccttgagaccagcgagcttgaggccatcagtgctctagacaagggtcttcgtttcaacgaccctgttgctgtaagtttgttacctgcggtgtattgactgttttgactgttaatactaactgttcttttctttagtacggcctcgaaatccccatcttctaagtgcttgcagactcaaaagcccgggagacggaagaatctccgcgatataatgtcgatttttatagcttggataaattaaaaagaacatatcaattccaaaaaattctaaatcttcagatcttctatattagctagagtagcatgcagtcttgttgtactaacatgtacatagataggcaattccgccaagaagtgccgatctcgaagatccgccatctttctccaacttcggatgtcacgacttcaacttcccaataacacaactctcacaatggtgtcccctactctagcgcgcatgaccgcacaggttcatataaccgcatttcccatgccaaaaaacctatctgaaagcaagcttgtactggccgcgctccagaagtttggagaggtaataacataccgcaacctcaaggtacggcggcgccctctctaaattatcattcagacgagccccgatttaacaattgccttagtatgacacgaccaacacttcaccaaaccctaaccgccccattgtcgcgatcttcgagacagccgacgcagcagaccgcgcgatagcagcttcgcccataaccattcccctaccgacatccacctccccctctaaatctcaatcttcaacctctattccattcacatcaactaccaagccacctttaaatacccgccgctcactcatcttcgaaattcaacactcgcgccacaaccacgcctccgccctcaaacgcagccccttctactctacctataacctcttcaaaaacaaccccatctacgaagatctgatcagcgacgagaccagtatcccgctcaaagaactggctgatacactttcgagcaagaagtatcctattggcgctggcgtcaagtctaatatccaggaggaaaatcgccgcatgggcgcgacgagtttagtgaatatgtggaaggagggtatggggatagatgttgagcttgagaatgaggggcaagattttggcgagaatggtcctgtggttgaacatctcggcggtggcattagggagcccggggagggattggaggacgagaagcaaagctcggtagtctgagtcgaggaccaggtttggccttttcttgttgcttagatggtaactagagagggaagagactttcttttattctgggctgatccgcatcagcaagtccagccgaagacgcgctctccttttatgagcagttgcattgactctgggccgaaggcgcagattggattcccctcctggcagctccatagccgcgctttgcttcgaatgacttgcattcagaacctctgcttctcgagctcattcctcgagaaggaggaaggaagatgagaaggtagggcatcttgggatgttccaacattgccccccaagcagacatgatatttgtcgcgaaccagatgaccaaggcaccatttactacctaaataggtagtatatagctttctctccattcttcatcttcttctctctccttgtcccttttcttcccacgggattgattacactgtttctccaattgaccttcactgtaaatcaggaatattctgtatagtttaaactgagattacgtgaactaaataaagaacccagccttgatgtagtccacaaccttggtgatcttctcaatagggaaactcctcaagtggtactactgtggtagtacgacacggcggccgcgattgagctcgattttccgggaaggaggttcttgagaaacaagaaaggtcaaataattgtcaccagagtcctcatcgtcagaaggaatccccgggatatcaggtgcctggatgagagagacatattagatagtataccaagcatcgtatcatgtaacatactccaggatactcccagtcaatgtcaaccccgtcaaggtagttttccttgacgaaattagcaattttggtggccattgtcagtcagttggcggctttgactccctgacggaaaatattgtaagtgccggacatagtagaaaaatcccagccgccaaagatagaatctttttggcccggagacgcgcaaaaaactcttgaactgatattcgatcagaacatctgagaatttgacttcgtaatctgccattaattcaccaaatgcaaagtgcagatgtgtttactctgacccgttaatctgtgaggcatcctggtacagacaatcacgactactcaagctataaccctcgaagtaggcaatgtttcgcacaacgtcaagggcagcaccgcggacagtctccgtaccacagttagaaatgcaaccattcgtgcccttctccgcggatcctggagctccagtgtgccacactattctttctgttaggacgattgcataatctgtttcttgaggaaagaacttacttgaccccaaacattgcagcacgcattcagggggcaggtattgagatcggcaagatctgttgtgtcgtctggcctcttagtactcggcttttgggggccgcacacagcgttagccatgggggcgggcataggcggattcccgctactcaggcaaataatgctatcgacccagacatgaacagccatttcagcctcatgtcttcttgtttaaatcttccagatccttattctcagactatactcggcagcaaggtctgcacaactgtcatcttgttgaatagtgtaggtagcacacgatccgtccgggttaggctttggggtaaaatcagggagtgttccggatgagcaacagacatactgccctggtttgagggttgaacagaagttggttccggagttgtacttggttaagtccgcagcggagattccacactttgtggccagagcagcgcagcggagccgagtgagacaaagggacaagatgccaagagttagcgcggaaacgagcataaacgagggcttggctgcgtctacaatgcaacagtccctggaaggaaggccactaccagtccatctatctcgtaatagtccgattcaggggctcagacaacaaaacaactcattttcgccgtttccatattctggccctctatcaacttgttccctccttcattactagcgaaagtagtgagatcctcatgtactataatgtatatctttccgaattgcctttttctggccctatcgcaaattctcgcgtgcagttgggcgattaacacgcgagggatcatggaagtagatttgattcttccgcgcaatgttacctatccccctcgcttatgctgccgatcatattcgccatccaaaatccgagcctcctcaaaagcttcggtccgatacttgaatagagtattgagcaggagaactttagtactagcgatggaagtattgctaatagaatcaatgccggcggttctattcgactgtggaacttcaatgattccagcagcaaccctcacttcctctattggagtcacgcgcggttcgatgttgaaggaaccttcgcattttaatgggggatccagatagatggatgctctcgagatccggagacagacgacgtgagcttgggaagatatggtaaacgcccccatttctacttctccaccaagtttggcacttcaccgccggattttgtcgctgtgaaagacgatgatacttgcgaccaatcgttagctcaggctttcaatttctccgatcttttggagctcccgccaacaaacacagttccctacggaccctcctgtctagcccaaccgcctaggctgcctagggttaccaatccttgcaatgtcagaatggactcaccagccgcagcaagtatctcggcggctttaacctctactgcgtgtgccgtggctcgaacaggggtaatctgcccaactccatctcctaaaaatgcagcctctaaggcacaattaccgattggcggggcatgggctttggtaatgagtacaatactcatttagggtctcgcatgattcatgttgactattccccaagagacttgttttttgttcttacagggacagttcgctcaattgcacgctagttgttgacactctcggaaccaagcaggtccgtccgccaccgcaatgcctgatatgatataggtccgagtccatcatatcagtatgcagtagtcaaccaaaaagtgggacaccctaggacaaaagaagtaaatgttatcttatagccagtctgatcaaacgttacatccacgattaaacaagcacgtgaaggcaccggtatattaaagcagtccaggaacggcatatttaagagaagcaccatcaacatcccagtttgttttctctctattcaaatccatgggttacaaggccgccatgatctctgccaccgttgtctgtaacttctccagcgtacctaacaaaggcgatacttgctcgtccttcgcttcatcctggggtcagactcttgcaaatttccaagctctgaacattagcatctcttgctcgactctcacagccggccaaagctgctgtgttgttggcacagtcaaagacgagccagcgaccacgacgtccacgataaccacgacggccttgacaaccacaacttccacctcccagtatgatccaacccagtctggcattcctcctagctgtgatggcttccatctcatcgcatccggtgaccaatgcgatacgattgaggccaagtacggcatcactgaggcccaatttaaggcctggaaccccagcattgatagctgtatgcccaccacttttatatcatttcctcttctgtatattgtcattcactgacgcttttttactagcatgctctaacctctggttggactactacgtctgcgtgcaaatcccgggcgctacaacaaccacctcgactccccaaccgacgtctacggggccttggccgcagatgcctggcgtcgcgagcaactgcaaacccttttacaaggtcaagactgacgataactgttaatcgatcaacacgactgcggccatcacactcgcccagttccgctcctggaatagccagattgatgccagctctatgtctgcattggactgtagttcaccagtcaccttttgtactgagatcctactatcctatgagacgtttccatcatttaaaaggccaaaggaagggagtaggatatcgtactcgcagagtgcctaagctgcgaaattaaaggaatacaaacagtgataagttagaacatcaaaaacacaaagcaccagactcgacagttgtgtctgcctacatctctcttaccgcctcctaatttgtataccccgcttttgggttgaactgctatttgtacttcgtatgtaaactcctaacaaaataagtcactcctgtcctatcttgtatcaactgcttcttcatccattaaggagttggatctatagaaatcagctcgaatataccttttctgatgaaaactaacaatgcatatattgttatatgtaaaccagaagtgcaaaattctgagtggtacccaatcaagaaggcggtactggaaattcaggcaggcgagcaacaatgccctaactatgttatatatatatttagtctctagtaaccattctatacgggctcaatgtacctttcactagtaatgagtgggtttactaggtcaccaggtcaaggtgatgtgattcccgcaaaaggggagagtggcagtgctaggtcttggcacaatgcttggcgacactaaaaataagtttccacagcagcgccaagaaccaattgggcgctcgtgacactccgcgccagcggaaacgacttggcatattgctccctagctggggagaacagaaacccagagagccttttcaacatcaatatgtcgagagactcttatgttctgtgatttaaagtatgcgttagaagatatttgagtacagagtgctttccctaaccgcctaagcccgggtacaccgggtaaggggggatcttggcattactacactctcatttcccaaaggacaactcgacgccaagcgcctgagaactgggcagtgctgagcagagctgcacccataacaaagtcaggcagcaggattggttgtgccaatgtcttggaattatcactctgtacataatcccgctggtacggcgcctctctgccaagtgactggtttcatcgtgatgggttccattgtctttttgctttgtcgttataggggatgcacactcatatttgcctcctaatcccaatgcacttaacctctgctctccatctcctagtcccatgcatttcctccgatgtcggttaccgctcagctcgcgtcaaatgaggcctgtgatcctttctaggtggttgaccacccttttggcctgccttctcatacaaaatgtcatcgcaattgacgttaaccctgaggatgagagtgtgttcattttgtaccctggctaggcatttcaaatgactgacatatacctctcctgacagcttccctcaaagatgccgccaagaccgttgccaccaccatgatggatttctacaatgaccgcgactcgaaagatattccagggaaattggacggtacctggtgggagggtggttcaatgtttatgaccctcatccagtactggtatctaacaggcgatacccagttcaacgacgccatccaggaaggcatgtattggcaaaaaggcaaaaacgacttttttccaagcaactactcccaatatctgggtaacgacgatcaagtgttctggggattggcggcgattaccgccggggaattaaacttcccagaaagagacggtgaagcctcctggatatctctggcggagggtgtctttaatggacagattcctcgctgggatatgactagttgcggtgggggtttgcgatggcagatctggccttaccaggatgggtataatatgaaaaatgccatatctaacggcggattgttccagctgtcagcgcgcctggcactatataccaagaactcgacctatgccgaatgggccgagaagatttgggactggagcgcgtctacaccgctgttgaggaagacctgggttatcgccgataccactactaacgccgcgagttgcaaggatcacggtgatcatcaatggacttacaactacgctacgtatatcgccggtgcgggctatatgcacaattacgcatgtctatcccctgtccctgacaagtcgagaatctcaattaacaggttttatagaccaatggcgccgaaagcaaatggctcgaaggcgtaacaggactgatgaagacatctgatcagtttttccccgcctccggtgcgaagcaaataatatcggacatcacctgcgagccaatcaataagtgtgatcgcaatcagaagaccttcaaggcctacttcacttcctggctcggattcatgtcgttgatagtaccatccaatgtcacggcggagatgatggggaaattcaagagctccgctgtcgctgccggtcagcaatgctccggtggaagcgatgggaagcattgtggagttcgatggacgaagaagacggaatgggatggaacttcgggcttggagcagcagatgtctgttttgggtgttcttaatgctgtcatggttccattcaaggcccagggcccttacaatgctgacaatggtgggacatcccaaagtgacgcacttgggggtaccaacaccgagagtaacttggagcctgaccctatcaccacaggtgatagggttggcgcgggaatcttgactgcgatcttcgttatactttgggtcgggacgatatcttggatgatttttggagacaagtagatacactcaactgtgaaggcgttcaatacatgtacatatattgggattttgataccttgagggattcaggctttatgataatttctgattctagcagcacatccactacaacagaaaaactatttaccacattcagggaacagcatcatctaaagtcgcgtcgtcaaaaatttgtgggtcaaatagagctttctacaagctctctgaaatcgtactgccgacttagtttcttcttacaatcattttgcggttctacctagagaaagattataaagagcgacttgctatggatggtgagagagctgagggagatcctggatatacagaagggcaagtatgccttgaatgcttagacaaccacaccaagatctttcccccatcctgtacagtgcagattttcttgttctcctcttaggcctcctaatcctctaggttctcgggcttcttatcacccttctgagccttgtcgtccttctgggccgcctctctagctctcacaagtttagcgacatactccttagtacgtagcaggcgcagtgtagctgcattagtagagatgccatagtgtcggctaacagcgcccatgtcgatctagaatatgatattacattagtgctgaaacataactgatgaatgagagatgaagtcaccttcattcctgtcgctttgatacatgtaagtacgaactcaagcctgtcttctagtatctcacgactaggttctgaggcgagcttggcaggcctcgagataggcttagcaatagcattcttgttagccttggccttgataactctgttggaagccatggtgaagatgatgctgatatgagcttgtttgatgtaaatgtaaatgcgaaaaatattgtcttagattacgggacctagggagcggagagaagaaggaaggaaagcaacgtgaattaagatcgtgaatccaatatatatcctgacctaatagcaaacaactttagcgtcttcttcgcatttcggacaatattgtgcgagacatgacctcagcactcagttgatagcgtaactacggcggaaagagataaaacacaaccaaaaggaataaccgattcatttatataatagaagagaactttgtgtatcatgaggctcatgtaagcttcgcagattgatttccgtgggataattagcagagcaatgtccctgaaagtttatatagcatccatagatggattgtgtaggtcaacacagtggcatgtccttctagataccctcactgatgttcacactctactgcctttacattcccacgaagcacttcatacttggcagaatcagaacagtatcgcccacattaagactaggcctggccatacctataggatacattatttcctactttttagcaacatcaatgcacaactttgttgctaactagctaggtaagttacgaatggaagtccggcgatggctagcctcagaagcagtcattccaaagttaactccataggtccttgcattctacgtgcacaaattaatcagcttacgcttgattatagaacgaaagacgccagagctattagtcaaacagacaagagtataaaaaagacattaaggtattaccctcattcccctaaactcggacaaacgctataaggtgaagtatcatattagcgccatgttcaaaatcatgtgtatactgcaagagagtcggagaggaaacgcttactagcatcaatctgctggatgttcggcaacgccaagcgcaccttattccgataaacagccggcccattcaattgcaacgggttaccctcgaagtaaacagtttgcagcttctccttatccttcagctcgcgctcaacttcctggaagctagcaagctgattattcgacccccacagctcctcgaggttctttagtgatgaaagatgttcaagatgggagacctggttgttggaaaagtcgagtacgcggagtgtctcgttggattccagccctgaaaggtcggttactgcattgtgagagaggtagagctcttcaagctttgggagcgcggaaagacccgtgattttggtgaggcggttcgattggatggagatgatgcgaaggtttgagaggctgtccaggttctgcaaggctgtcagcttcttagtttgttaaggtatattaggtgacaactgcggaccttcatttcgacgatcttgtttttcccaagccagagttcttccaacgcggtcagtgtttccaggttttcgatttcctgaaaggactcgtgtcagcatttccattgttcacctcgtacccagtatcatataatacgaacccgaatcttattcgcgcccaattccaagttcttgatttcggtcaattcctccaagccctcgatacgggagattttattctgcacaaagaaaatctcggtcaacttcttcagatgcgagacattcttgatatgcttgatcttgttgaagctcagatccaagcttgtcaagttatggaactcctccaggccgttgatgtgggagatgaggttatcgtagaggtcaagttcggtcagactggcggcgacattaggaggaaagttgatgcgtgatatttgattctggcgcatgcatagtctctgtatatcctagcgcattagccatctggataaaccaaagaaatgcctcgccgttgcacttttgtccttcgaggaaaaagtggtaccatgcccctctccgctaccaggcacatgcggattccagggccgttgggagtatgtacctgaagtttagggaagcgttctaatttaagagcagagattgacgatatccggcaatgcacgaggtcgatatcctgcagcagaagaacgattagcaataatgtcgcgcgcgcgtcgatcagcagagtccagggctatcagcctacctctgcattgacatcttcctctgccaatagatctgaatgtccattagtctattgaatcgccaatgaccgcgccttaagcaatcaatcatccagcgaccataccttcatcagcctcaatctcatcgaccgggggtgcatccggatccgagtaatctgagtcctccagcgcctccgggtttgtaataaccgcctttctctccattcgcatttttccgtcccagccctccttgttcttcatgatttcagcctgcgtgagttgtgggatgtttggtggtggttggaatcgcgattgcggggagcttttggcgtttttatcgggagacgatcgccaacgggggattccgaaacaagggaatccaaggatatggagttgaaagaacaaagaagtaataaagagttaagagaagaggttgcactgcgagtcaggaactgaaaccttggtttcgggaaggttgagctcaactggtgactacatcatcgtcttaatgcggatgcggaatggctccgagacacttgaacctatctacttccgtgtctgggttcttaatatcatagataagaaggtagtaattaatggattaaattcatctctactctaatagaacttgctccattttgttttctggatacgtcgtctcgggggctatatacagcatcgagagccgtgattgatcaagtacattgcatgaatgaatcactccgacaactttggcagcgtaaagagaattattaggcactgctcactatgaaggaaatgcataccactgccaggcagaggtcccagcaaaggagaggacacaatgaaatgcacgctcgtgtattggtgagctgagatcaacacaggtaaggccgtgtaccagggcagaaatgggaaaataaaagcatatgggggatacagcggggacatgataaccaagagacgcctgcagaatgcataagaagcggacttgttgggtgttgggatgggggagaatacacaaaaaaaggaagatcaggacatgagggggtgttggtaaagcacagggaagaaaaagaaacagcaaaagaaaaaaggggaatgagctcctcggagcgagtgagatacaaaatcaaattgcaatgcaaaaggtcgaggatggtcaggttaatgtgctatccaagaacgacaacaaatgcaggagacggggccttggcccagtaggataccagttccatctgggtccatgctctgtcgtcgagaaggggaatcggatttgaagtaggaaatagggcgactacccatcaatggcagcaatgctggaggaacgcaaaaggaaagggcttttctcgcgtagaaaagaaagtggaaaagaaaacaattcgctcaaaatggatatctcaggcgtaagaaggatcccattgaggcgactacagggtgcagtccaggaccatgctgacatcttggaccaggggccctgcgagatcctcgaggacagggatgagatcgagcaactcattgtcatgagcgtcagagaaccagctactgatgggaatcgcatgctcggggtggaagatgtaggatgtgggggaattatcaatgatgattgtgtccttcaagtctcgaccgacttgtgaaagatcctggataatggttaggtttttctcaatcactgaagaggactaaggagctcaccttgacgtagttcccctggtggttataacaactctctcggaataagcggtgatgaaccacgttgtgaatatcaagttgatcaagcaaagggtcgccatactattactcgagttagtgtgtgtcactcgccgaaaactatcaactaccaactgacctttgaaaccgaggcagtgaataccaccacttcgtaaagttcaccaacgcgcttcatgaatgcgtccacgccaggacgtttaatcacatagatgttgtgatattgaccttcgatctcaactggaatggtgaagtcggcacgctccaagacctgacaaatcaatgatgagcgaaatgatacagtaatacgattatacgcccttgggcgcatactgaaagcggagacttaccttgaagctgctgtgaaccagtgtttcatcgagatcaagtaccaagcactttcggccacttaagtgaggcaaaggcgcagggagcaaaggatgtgcttcgtcctcataattgcctcgagcagggggggccgggggtgcaggtggcagtggtggtggtggtggagggatcaccacggggagtttcatttcttgatgagatgtggcttcttcttgcccgtcagtgccaaaatctttagggatggttgacgttgatgcagaagggaggtcctcggtggttgaggttgattggccctccccattgtaagtgtttgcatctgctttcacttcaggtacagattccatcacgattttcgtttgatcgtgtggggtaacatccttggtctgatctttctggccagaaaattctggctgcgtggcatccacagaaggaccatcgccttgcacactagccatagcagggtggatattgcggtcttcttcgccaggttgatcggcgctgactgtggagtttgctttttcatctagatatggctcccttgattctacagtgcttgagtcaccagtaggaggctctaccttgtctggagtaggcaatctgttagaagcaggtggccgcatggttgttttctttgcaggcaaagcagtgtcatctgcatcaacatccgaagaggagcaacagcccaagaaagctagaaacttagatggacttttcttttgttgaggctttgagggattgtgaccgggcatagtcgtcgcctctttactctcctccgcattcactccgttctgagtctggcgcgaccgtcggctacttgcccggctgtggtcccgtttcgaccgtaggatgctcactttggaactcctccgagaaggctcatcttgcgctgcttcctcggtcttttccgactcctgttgtttgttggttctcgaggatcgtcgcgatgggatggggatcaacaaatggcgtttcttcggagcgttgacgccttcagcagcggtcggtgtgctctccgatggtgaagaggctgggtcggaaggtgcgacagaagttgcgtcctgggttgcggtcgcatcggtacctctaccctgttcgggctcaggacctacggaaggaacgacgttagcaattatatccttcttgggtacaataggtaaaaaggagcaagcgcattcacttactggatgagcccggaaggccggaggtgttcataagtgctttgtctgcggattccagagctgaatctcgcgctgtgccctctccactcatcgagggtggctgtggtgtcaggtgtcccgacacggataaatataaaaaaagagagtgaagcgaaacagttcccaggtctgaaaggccgattcaatgccagaactctctaaagtcgagagcgcggctaataggggacgttaacacgcctcctagataataagcaagcgctctgggaagttcgcacgtaccgcctttggccccgggagtgatccaacacccactattgcactttcgaaaacaacaagctaaacgaacagaaaagggatgtgatatctctatcgtttaaaggaggattttcggggggagaggagtgaagaggagtcgggggatgtcacgtgaacgtacggtgtgggaaaacgggggggcagaggaggaaatgagatttatttcctttcttccttttttttacgctaaaaagggctaacaaggctagcaaggcacaggggccctttttcacacgctactacaagccctcggcggctacggtaaatgccgacttgctatcacagtgtgcagagtcataccccgtaccgagtacttggccgattctactttcaccatctatatgggattcttcaagttcttcttcactctagacatcatgcaacaagacatcatgcaacacaggacccgagtccaaacaagcagaatccttttaagatgatcccggtcagggcgcctgtggggggatctaattgtggatattaactgtgattgttatgtacggccccttttttatgaccactcatatggccagtaggaggagctatggccttcaaaacgtgattaatttcatttgatgtgacccaaattagatccagtccaaacaccaagtcgtaaactgcaaactaggttgtacctagctgttgatgttagtccgagttctcgaggttcactctctagttaggttaggtttcatatcgaggaagatgaacaaagccatgacacaggatatcaaagaaaatcatacggactatgctgtagagacaagagatgacaagggtggaaatatcgccacttctattattatcaaggttggcttcccaaatttctggagttcattggcaggtcgctggatgaaggctgggctgcagaaagagtacagtcagcttccccacgtgagttgcttctccgcatatccgaggttcacatgcaatgatgcaacaaaagccccaggatatcctcaactttactttcttgtcttcaaatgcattctctatggtttggaatacatttaaattaacttcatggccttcggtcgagtctagagaccgcccctcagttaatccgtgagtcggaggtctcaagccatttggagatggccgtccagtcaacccttcggcgtccggaggatcccctcctgacattatatcgccattactccgatctcatacgctccaagttccaccgcacatccaaaaccacccgcttgattgcaacgatagcccttcttttctccatcatcggctcgggttatggaggctatacgtggttccgagcgagagccaaggagcgggcccagggtagccgtctattacgccgaaactctggtatccggggcaaggatggatctcgaactatatacgtgccatacaaggactccctgacttccaaggtcttgatccatcccaccaaaccgactacttttgacgctcatcgacgactattcctcaaccccccggcatcgagtcgcagcaaagatgatggctcagcaagccagatccctccccctacaaccaaaccaggtctgaatttggcattcttgcatcaattcttgagtttgggtagtatcatggtccccagatgggggagcaaagagactgggttgctgatgagccacggcctttttctcttgatgagaacatatctttcactgttgattgcacggcttgacggtgagattgtaagagatttggtcgctgggaaaggaagggctttcctttggggtatcttcaagtggtgtggaattggaacccttgcttcatataccaatgcgatgatcaaattccttcaatccaaggtgtccatcgccttccgcactcgattgacccgatatatccacgacctatacctaactgacaataacaattactataaattgatgaacttggacggcggaatcggtcaagggcccgatcaatttatcacgcaggatcttaccctgttctgctcggctgccgcatcactatactcctcaatgggaaagccgttagtggatcttttcgtattcaactaccaactttaccgatccctcggcccccttgccctcagcggcattttggctgggtactttagcacagccgtggtgctccggaaactgtcaccaccatttggaaagcttaaggcagtggagggcaagaaagagggggatttccgtggcctgcactctcgacttttagccaatgccgaagagatctcgttctacggcggagccgataccgagcgggtgttcctagtccgaagcttcaaggagctgcagcgatggatggagggcatttatagtctcaagatccgctacaacatgctcgaggacatgatcctgaagtactcctggtcggcgtttggttatctgataacttctttacccatcttcctccccgcctggggtggctcgggtggtgcaatggagttggccgatgtatccgagggtatgggtcgcgagcgtggccgcatgaaggaattcatcactaacaaacgtctcatgctttcgctcgccgatgctggaggccgcatgatgtacagcattaaggacatatccgaactcgctggctacacctcccgcgtctacggcctcattgccaccttgcaccgtgtccacgccgatgcgtattacaccccacggggctcgcatcccgagctatattctcttgcggatgtccaaggcaccacccacaacggcttcaacggggtccgtctagagcaggtcccgatcgttgcaccatccctttacccaatgggcggcgacgagctcatcgagtcgctctcatttatcgtccattcgggcgaccacctccttatttcaggtccaaatggcgtaggcaagtctgcaatcccgcgtattgtggccgggctctggcctgtataccgcggactggttagtcgccctcggggcttcggcctcgacggaatcatgttcctcccccagcggccatatctcagcgtcggcactctgcgcgatcaagtgatctacccgcacacggagcttgatatgcgcgaagctggcgagacagacgcagctctacagaagattctcgacgacgcccatcttggctacctgccacagcgtgaaggtggctgggacgctcgcaaggagtggaaagatgttctaagtggtggtgaaaagcagcgcatgggcatggcgcggctcttctaccatgagccgcggtatgcattcatggacgaaggcacttcggctgtttcctcggatgtcgagggattgctgtacgacaacgccaaggagcgaggtatcactctcatcaccatttcgacgcgggcgtctttaaaaaagtaccatacttataacctgactcttggtctgggtgccgaaggcgaggcctgggagttcgagagaatcggtactgagaaggagaagcttggtgttgagaaagaactacaagagctgcggatgcgtctggataaggtggacgagtggaagcagcgccgcgaggaaattgatcaggagcttcagaaggtgtgggctaatggtagtgaagttgcaccgccgccttatcaggaggcagagcactctagctctgaggctctaactggggtaacagcgaattaaatgtacacagttattggcaatcttgaaggcttctcatggttgaaatccatctcctatgcacagtagggatatttctcagttgagtgttatatcgggcgctcatgtggcctctgtcattgatgacgtagtactttaataacccgacatatttaccctagtggctcaagataatattagggacgttatatgtaagaacacttcagtgtctttttgtactccgtatgttctttctagatgtataaggatgattcgaattaaagcggcaagaaatatttacctcttaattcaccgccttattaaagcggcggtatatcttatcgataagcccatcacagagaaaaccatagttcatcctcacttgctttcttgtacagagcctctgctcactgtctgcggccggatccttgagctgtattgctgttctatctgatttatttcggtgttgctgagcccaagcccccttacaatccaatctgcactccttgaggcagggaagacaaccatgtcttacagcagcgaggatgaggactccaatgttaatattatccccatggagaattttcccagcgatggagacatgagtacatggccctcaagtcactacattgaacgctccgacttgcgctggcggcagttacttgctgaaaactggctcaaagatatgggcacttatgaagatggtgagttgattgcagatgcttcagattcacgttttgtttggcatactggctttgtcgcactgtatttttttccgcattgcatttgttgggtgactgcatctgtcgtctcatgctcattcgttcattcgctccttcgtgctttgtgctggcctgttatggcctctcttttctgtttgtatactttatacctctactctcagactaacagagcatatattaggtgtcattcataccattgagaagttgcctgatggatactgtctatttgagcgacctcgtgggactaatcctagcatggtgggcctttctggtgttcccatcttgatttgcagctaacaatcatatatgaagtttgattcttttctttttggtcatccaagcggtcggtattttcaatcacagttatctttcttgccacatttcctctctctggtcaagaacgagcttgacaagtgccaatgcaagccctgtggtaaaatgaagatgagcgaagggactgcagtgcaagggaaggcgggacagaggactagacgcgttgtacaaccaagtgagtactaccatgcctcttacgttagatcgtttattgatacctattgagtcattgatgagcgccgacccaccgatgcagagggaccagattactggcgaatcttgattatgaaattgaaagataagggggccctcgacgaagatattgagcagcggttcaattttgactgggtattgactcacgaatggctttctgattactttatgaaactggttctggatcccgcttacatcccccgtcgtggtgagcttgttctctggatctggcagggtctcgaagacggctgcttgatgcgcaaccctgagactggcttcattgagatatttggcaacgataataagtggcatggtgtgcccaattggcgtgccggcgtggtgacccaaatcccagaggacgaagggcatatggtaaatatcattgaaggctccgataatccacgcgggctgagctactctggattccgtttggagactctgccagatccggtgggtagtgataagtcttactcggtgcaatatgcctatgttccgttgcgtaacatcaagccttttaacacatggcaactctacctcaatggccaagagcgaggggatattcacccatctattgagaatgccatgactgttatgtcttcgtggagcatggttcacaaattccatgttattggcacatggcccagcgccaggatctactgcaagggaatcttcgtcggggccgaactccttgccttacacgacaccgtccgtctgaggccacatggattccatcacgaccagctcaagtacggaacagtcggcgaagtgacagacgtgatggttattgaaaaaatcgcgctctatctttcagagtgcatcgacgacaacgaggagcagctagccaaacacttcacagccctgatatccggtaaggtgttcaccactgatcctagtcgcgttacccaagaaggcccattccaaggcagaaacccagtgtcatccggcggatcagcaactggtcctatcccactcactacggaagaagcaatcgctaccttccgccaggtcggcatgggcgactacggtccctggtaccgtatggccgatggtagaacctgcaacgtctccccacaccttatcgtgggtcgctgctacgaaccgctcgcggcagagcttatgttcggcacccatacaatgagttacgatctatccggcgttatggaaggtcgtcagtactcgtcacaagtcgattcgcgtatgcccgaaggcaagacgtggttctggggggattgccgggtggagacgctcggactgacagaaatcaacggtgtggaatgcgggcttacagcggcgcagcgcgaaaacccgcgcaagtggcaggcaatcatcaaaatatcacacggtgaagtcggtcacgatctccggggccaggccgagcttccttcttctgtcggccgaccctccaagtcttcttcgtccgctccgaagggtaccagctctcggccgagaactggtcttgagcatattgcgcagacgagtaaactggtcagttctgttatcggcagtgtacccgatactgaagaggactcttttgatgatcaagtgtatggtggtatctctgagctagggattggggttggtcattcttcgggggaggatagtgattattcgaatgagtaggttgattcgatccgatgtgcccgttgttttccctccttttagcggcatattcaagatacccatgggcgttacggagggataattctatcttgaccagatgaaattatgtgcagactgtacaatgttcaaatagtagtgtatcttattatcccacagctatgtaatcctgcagaacaaacagagtcaacatctagaagaataagcgtaaactacgaagaatattattgcaaccaatatcttagaagagaaatagattccatggctattgctttcatgtctatgtctaaaaactgacactcatataagaccaaatacgccttaaacctcactctgtccagcagaattccgcctagcgatacgtttcttctcagaccaggggaagtgaataacaggaggcagaatgaagctgttactgttatcagcaataccagcaaaggcattataccaagctaagaaagcaccaagcagagcaaagagcccacccgcctttatcaatttctcatttggcgcaccatccacattgaaaaggtacccgagggagagcaagagaatggcgatgtcgacgaagaaaaagagggagaagaatgccaaggtggatttgagagtgagcatagtgatcattgttgtgaagatgaaccagccctattgagagtaagttagttccaatctccttcttcttgcccggaataacatacgaagagatacaatgcaaacgaattgtaaaacatagcgggagacccattatccgcttcttcaagggcccctatgatatcaaatccaccggggataaaagtaatagcaagcgacatccagaaagcaccgtaagatgagagcacagtggcaccaaaggtattgccaatcgccatttccctggttttgttagctaaagcccgagtattcatgtccataacatgtctgaaacataccacatgccagccaaaagctgcacaaagccgccataaatcaatgcaggcccaacgatgatattaggcgcagtaatgcccctgacgttcatattgagacatcccagcacaaaggtggtgagtgcgaatgcgcacaggcctagtggtgccggattggcgagcttgcggtctttggggatgcggtatagacctggctggagatcacctccgaaggcagggtaacggctcgaggctgtgttgacgtgggctagggggccaaagtggcctgtttcatagtcgtcattgctggaggaatagttgtttgtatctttggcactgatatcttcttcgtgggacattataggttgggggcgtgaggtagacatagatgtacagaagagggaaagggggtatatagttcgagaggagggaatatatcccggatggcaatgcaattattctggacaaggttgacaagtttgacaagaacaattgcgagttcgttctgctttatatattgcgtagacaagtcgtggacaccatgacaccaccacgccccctcaacacatcatgatcaggaaacaaaattcctggggaagatcagcgccagtgcgggggcggggccagcccgaaaaagagtcttcggaagcgagaatagaggcgacaatagggggttctgctggcattgctagcattgctggcatcttggcataagagtaccccgtagtggagacaatatacagttccatccgtccgtagatgatcacattgcgagtacgagatcgtgatgtatcgagtaaagatcaacacgtaagactcgttctgagcctagaaattatggggaaatgcggagatctcctaggtggtagatcttggatctgtctataacagggttagcgagggtgactgtgtggggtttcggttccacctgtcggcatatttagcatctctagcactggattatagtgtaaatacttggcagaatgtggaaatctctgtcactgcctagattcatgtgccaagctggtcatcggggttcgaaacgcgtcactcacttttcctagatccatccgggctgaattcgccccccgggaaatccgcacgctctacggaaaaaaaggacaaaaactcaatggatgatttagattaacctcgttccaatcaaagcacaagctagaaacttaaaatccttaaactactcagtaattcttctgtacaacaccccttgcaaactccgcaaagctcaatccaggctgaacttcctctgcaaggttcggctgcgtgaatacagcaagagtattcctcgcaatcttctgcccaggactagccttagcccctttgacaaaatgcggcacggccataaacttgccgtgcgtgattagctgcaaggcctcaccagtctggaaagccagacaatccttcggaatgttgactttaacaatctcatcagtgcgggaacggatgtacagtccggccgaagggtcgggggaatggggaagttcagggagaggggcagatgcagaccctgacggatcgagacttggaggcgaagcggcttcatcgaggaacatggccgatgtcaagcccgtcaaacagccgtggtcaaggtgtgtagcgcaccagtcgtcatcactagtttcaacctcttcttcctgattagggaaataatgtaacagccgtgccttggttgtcaggctggttgtcacgacatggtgcagatacccaggcttgtagccttcgatgttggcttccgcataccggtcacatgccttggcgacgagtgccgcggtatcaatgatcagcccacatagtgactccacgctacccctgaattcgggtaatttggctggcgggggccagatgtttggcgcggtatactggggtagatctgggaaatcatctgccggggcgctgtctagagatgcatcctgatagaaggcacagttcacgtaatacgagccctttaatgtatcgaaatggcctgatttcagcgtttctttaccgcaagaccagccgaccaagtatttggactctgggctggtgagggtttctacatggaggttagtctgattttgcggttggagtcgggtggaggggcatcttacctagttcgggatcagggagagccgccaaatacgaggcattggagaggacctttgtgcgcaagtcgctgaaggtcgagggcaggtctttgaccacgatgatgcccaaagaggacggcccaaaggctttggtcagagtatcgaaggagacagttcctacaaaacttagcatctactcttcttcttctgttcttctgttcttctgaacacataacttaccatctacaagttcatgcagactgacggtgacggcctcggccgtgttggtctccatgatgttgtagaaattcaaatcaacttccccgctctcgtatctttctaatctcagagggcagctcttcgcctatctgccactaaatttcacacgatgttacttgatgcagggatataaataacacatccaataggagtcgagaattccatatcgtcccattcttggcatatcgtacagaccattactattacaaaagccctcactcgctacccgactgtccatgtcgtctagtcacagcccgtagattaccaaatggcaacacatcggtaattcgcttggcccccgtgaaaagcatacagagacgatcaaccccacaaccccatccaccggtaggaggcaaaccccactccagggcttcgaggtagctctcatctacctcgccaggttcatcagcagccttgctaaatcgtagctggtcctcgaatttgcggcgctgctcaaacggagagttctcctcctcgtatgtattcaccacttccttgccctcgataaagagttcaccgcgtgcggcgacgcgctgcttggtcgtcgggtgaacgaaggatttagagagtggggagaggcattcgggtgggttgatgatgaaggttgggttgatgcactgtgattcgacgtagatgctgcatagttcgtcaaggagtcgcgggagggttgggttcgttgggagtgggagggagagcttggtgaagatagcgtatactttgtctagggcgtcgggggattcaaggtcaggcagtttgtgaccagtgccctcttcgatgcctataaggaagtcgatacggcggaatggtgccgtgaagtcggctgtggtggggttaagagtgcctgttgtgtttaaggcgcggatgtgggctgccattccggagaggaggtcttcggtcatggccattagattctcgagattggcgtatgcatggtagaattcacaggtggtgaattctgcgttgtgtgttttgtccaatcctatatctcatcagctttgttagacaggcatttggatatctgtttcaacacaccctcattgcggaacgaaggtccaatttcgaagatcttgtcaaacccaccaaccaccaaccgcttgagccatagctccggtgcgattctcagcgacagctggcggtctgggaactcggtggcagaggtatagaacggacgagcaattgcgccgcctgccacagacccgatgatcggggtactaacctccataaaggatcggtcgataaagaactggcgtagatactgtaccagggccgcgcgggctcggatgatatcggctgtcgcggggttggctaggaactggacatggcgagggtagggagaggtctcgtgctcaatgtcgtgaatggggacatcatgcagacacggcgagagcagttgcggcaactcgctcacatcgatggtgagctcgcctcgtccagtgcggtgcggtctaccggttacagctagaatggcatttagcgacactcgagtcaggccggacggagacgagacatacagaaagcgtcgccgcgacgcagaagacgatagaacttcttgaagtcctcgggagagacattctccagacgacgcttgttgcacatcacctggactttatggccgtcctgcacgatatcgaagaagatcaatttgcttccggcgagtctataggtacggattcttcctactattctaagtacatgggcattgtaaaggccagaaagcagaacctaccagagacgatgactgtgtcttctactgaatcattgtcggcgagctcggcgtagcgagagcgaaattcggcgcagctcagtgtgcgtgtgtccaccgctaggcgagggtatgggtctgcgcaggcatctttgatctgctgtacgcgatcctgtaaagccttctttcctggtaatactgcagagctatgctttcgaattggctgtgtggttagtcgtgatgtaaagaaagtctgaatgcgggattgtctagcgagtcgcagtcctgcactaaagatttgggttagcaatgttcgagaaaattgacattgttgatccaaattaaagcattaagctttgtcagataaaatccagtacgttcagtgtccaaaaggacatcactgtagcggttctaatgcggggataaatcatcatataaggggcgagtgggaattgagggagtaaagcgataaacagtaaatgcaagtcttacctgtttcgtaggccaaagccagataaagcccatctagggcgaattgaaagcatagcaactgccaatggctctcacattgttaagagaagagaggaagaagaagaagaaacggcagaaccgagtttttccacgcgggtggcccaagcttctccgacctcccgtgctccgaatacgttggactttctggtgctctactccacatatctagcctcttaaccatctacattccaaatctactccaaacacatatacatcatgtctttcctcttcggcggtgcccccaagatgtcctcggcagagaagatcgctgccgccgagacagaagtcgagatgatctcagacatgttcaaccggtaagttgaagccctacagaatacccaagcgctatgactcgattcaaaaaccagaagactgcaaggaatttcattcaacccatcttcgaactatatatatgcataacccattctaacttgttaccgtcgcgatcatagcttgaccgagtcctgcaccaagaagtgcgtccccgccgattaccgcgaaggcgacctcaacaagggcgagtctgtctgcctcgaccgttgtgtgtccaagttcttcgatgtcaacatcaaggtcagcgagaagatgcagggcgaggccaacgccaacaagcagggtggcggcttcatgtaaacgtgttgacaacgagatttcttgggaaggagctctggtagacttgaagctagagagctcggtggtctttgtttctgtgtaaggctatttgactggttcggcctgctgaaaccgggcctgttttgaatgatggttcacgtttataccatcacggatggaaggtacgatcgccggtctatctctgaatatgtacaatatggtggatatgggaaaaacagagaatgaaaaaggaaaatatcatacaagtgtcgtcgttaggtcagaagcccatggatcgcgctatccatgcggtccaggaagtatcgtgctgttcctcgcctttgaccagggctttgattctcatctcgacatttacaatgtgacggtcaaagtcgctcaggccggcttccatgtcctcgaccttggactccagaacgtgtagttcgtagtccagtttggcacccagcaactcgacgcgtttcacgccatcggcgagatggtggctttcatctatgaggatgtcactagatcgttcgcgcaatctctggtagtcgccaaagcgttccaggtagactgagttgagctcctcatgtcggtcacataggagttggttgagaccttccacggagtccacttgtcgttcaacccaaggcacagtatgctggctcaactcttgaatccgtgagctgaaaatgcgtccctctgaggcaagcatgtcttcttgaacgatagcctcatccaggttattagtttctttgaccgttggtttcccacctaacggctcccatttgaataccacttcttcaactatgctgaacgacaggtgtcgtgcgcagaagttgtctcgccgttcaagctcactttcaagactttggaatgcttcgcaactttgcggccgccgcagggccatgacagctatcccgctaatcgagccgtcacggtcacgatccgttgacgctgccgtcgaccgagatataacgcgttccatatcggattcttcctcgattattggagcctgctgtacaatgggccagtcttgagcttgtgtttctggctcatcttctggcacaggttcgatatggatttcaggagcttttctctcagactcggaaaaaggggacagttgaggtttctcttcctcctcaatgagcttttcgatatcgtttgatatctttctttctgagcggaacccagagtcggttcgtgtttttgttgacggtgcctcgttatcactatcgatggacgggcggtatgcaagatcgtgtgtcacctcggagctgtctcgtgaagaatgatgctgatgatgatggcgctgccgtccgactgcatctttgaaacgtcctagccctgctcgcgcatctgaaactcgcccactgacgcccttctttcgatgatccttttcttcggcgggcggttctggcgtcttccaagagcgatctagcgcggagctcgctcgctcggcatgtaaatcctctgtcgaatgctttctgcgactggtccagacataaccaccttgttcatcggtagtaaacatcatatccgatccagttccccgggtgaacccgtcttcgacaccactcttgcgcggtttacccagccacagccacttggctctctcaccattgcagcactgaacaaaagtgtcaagatccagtgtttcgatatcggcaataccgcctttgtcgcgcccgcggaccatccccataaccatttcaccaccttgtccactcagctccgccatggttgacttcactgcatcggtccagccttctgcgttagcagccttggccgtgacacggtgtaaccggtccaatgtgagtcgatccagtcttcgagaccgcttcattttttgagacttttggaacccaccaattcctcttttcagactgtggaagtcgaatgcgtctttccccactggggcgccataggcgtgcagtctatttcgagccccaagcaacgtgcccagcaatgcagccacgctagtgggtcctaggctgctgtcgcttggctcaatgttgtacaggtctgttccgatatctgtccaccaatcgctaatagctgcctcagtcacatcacaaagtagcccgtccacatattccggggctagcttgtcaaacaccatcaaggcaatctggcattgtctgaccaattccatgaccgcattgtataaaggaaccctctcgcttgttcggtacaactgatgaaacttggcttcggtcgccgctgagggatgttgaagcttcaagcccgcgcggcctgcgcacccaagtctttttaagtcttcattcacaatgaaatcctcccggtgtttcttgatgtcgccgtttggtattggaataagactcaaggcagaaggaaatgaggccaaatcggtaaccatgaccgtccctagtggtgtttccttccttctggcgtggcattgcttcatggcgtcaaagtacatccgcaatcgaggcgaccatgtagtttcattggtcggaacactcagtactcccacaatcaccgtatgcgaagggtcaccggtataggtcgaaatgatgaatgtcggatgcacgcgagagcaggcccattgctcaacaatataaatttcatacccttgcagtgttacacgtcgctggagcacatcggtcgaagggtcttcttctaggtatcggagggcaaccgcatcagtgaacacaattcgctggtggccttgcggtgagggacgttcggctccagttgcgtgagaggcggcctccgatggcagagagtcggtacgatcgaccggagggacattcggagcgttgacctgcatgatggctggtctcctgttgggctcatatgctaaaggaacaagatgaaaatagcgccgaccattcaacccaaccttaaagtagatcacctctcctaagctcaagatacgaagggagtgccggccttccttcgatcctcctgcactcttggtcaggtcggaacagttgtgacatatccaggcaacagggtttgaggcatagcatgaacctgaaataaaaggagaaaggcaaatgtattacgggcgaacgccttgagaaccgcataaacccccgaggtgtgcagaagtggcgacgtcatttctgtacctgatggcggacggatcatgtgaccatggctgtctggtgttttagcctcaggcatctatgattgtacatctcccctctttaggatttaacagctttgaagagacctcgcgacaatggtcagcgctcccaagatgcaatatatctctgctaaatgctcaagagaaaaattacgaggctaattattctccaataagatctcttctacaatgaaatctctctccaatatatgacgtctgtcgggaaattacatgctaactcttatacagcaaagcgaatacggcatcaagaagaaagaggcaattctcgaaagtcatcaccaggatgctcgtccagcgaaatggcagacggatttacatttccgatagaactatgcatgttatgagcctatcaattcaaagcatgtgctcccaaagctctaggatatccacctccagtcacctctgtcctgctatttagcgtccacccggctgtataatagtcagcaaaagactcatgtgagtgaacgagctatacatactcctccatggggaccaccgggtccgccatgtccaccctggtgttgtccaggaccaccctgttgtccgaaacctccctgaccaccaggtccgccggggccaccctggtgttggccaccttgctgctgtccctggaatccaccctggggtcctccaaacccagggccaccagggccaccagggccaccctgctgctgtccttggaatccaccccgggggtctccgcccggaacgcccgcgcgcccaagactcatgtgagtgaacgagctatacatactcctccatggggaccaccgggtccgccatgtccaccctggtgttgtccaggaccaccctgttgtccgaaacctccctgaccaccaggtccgccggggccaccctggtgttggccaccttgctgctgtccctggaatccaccctggggtcctccaaacccagggccaccagggccaccagggccaccctgctgctgtccttggaatcccccctggggtcctccgccgggaccgccagggccaccatggggaccgccgggaccttgctggtcgccgtggtttccgtggttcccgtggttctcgtgctcgtgctcgtgcttgtcgtggtggctgaagagacccatggttgatgatggtatgatgaagtggggaggtggtagattgatgaacagtgagatcgagatgttatttgagtgtgagtataattctggaaggaaaaggatggaggggttacagctgccctttataaagactgagtggcgtcaccgatcagaatagagctaagacgctatgagctgaacctagtcttagacggggatgatggcatcacatcacgtacgacttgccgatgtggagtatcagaagcctatgattgggacgtgctgggtatctcctccacttggtaagagtatcgatcgatgaagacgtagccagaccctagatcgatttgccgttcttatttaatctattgatcgactccatcaatatatatctgagtatcggtagagttccagcttgcagctattcagtgtcaattccaatatgaacagccaactttgtaacataatattagcatttgcagattatctttgggggcctgtcgattgctgctcagtcttccgctgctgggcttggcgttgtcgatgcgtacgtacgcctctccacagctccagccctactccggactaaccatcttattgccaaaattctatcgcccaaacccaagagccgttctcggacttaattgccggtatttttttagcgtcggtcgtagtcatcataaacagtaagtgggtgtcaacctccggggccgtggaccaaccagcatgccagatgggcacagccactgtggcttgttcgtaccgccacattataggtccatcagctagccaccatcgggttaactagaccatctttgccatcatcggcgattagacagataaactacaatatagggttctgacagattataatttcaactacggagtaagtcctcgctatgtaagtaacccaacaccattcgggtgttatagcttaccacaccatgacggaaatagtggcaattgtaccttttgttaaagatttgcatacaaaaggcacatacggctcatcatcagtttctcgactctcgaaacagataggaaatttacagtcactatccgaggctttatattttctacaatgaacgatccataaagaggtatcgtatagctatagcgcgaactattgttgcaagttgttcgaaaacttcgcgccatagcatattggaccccctgcctacggtttaaataactagtgaagagggatatgtggatatgcacgatggacagtctggcctagcagacaagacgagagcgacatagcaataccaaccatccagggaggtcagctagcaagcatggggatcacacagaccgtagtagaaatctttatctcctaatacaacaacatcctgtaagctcctttttcattctgtaagtggtgactggtctagattctctcctctaggattctatgtagttgacatcaacgccccgatattctctccacgcctgaaaggtaaggccactacttgaggattccgctttccccaccagtaccgccttccttattaggtgcgaccttgtattctgccatataatctgccacaaaagacatgcattttgatcagaaaaaaaagtatattctacctgattcctctaaatttaaccccttaataataaagaagttgatatgacagcagttactttattttgatacaggattacatacaaattgcgactgtcttgctactacatatttgacgaaagtgatatataaaaatagaaggcggtgtgaagtgcgatagatagaagtgtggtacccgaatggggattggttgcttggcaaggaccgggtctcgagggaaatacattagcggatgttgttatattgggaagtcaagcaagtagactgtcacgtagttataaagaaaaaaaagaaattcttggtattcgtctcacgagcacagaaatatatatgtacattctaaaaaggtcgcgaatcgaatcaacgctataagttacaggcaagcgtctatacaataggacgtatccagccacgggctaaggcaaggccatgctcatctggactggttgatatccctttggattgtggagattcttgtgagcggatggcatcagatcgacaatcaaagagagaatataaccggtgaagacaaaggcgatgactatggagcggattagtataatatcaggcagtggacaggcgaaaatcatatgtatactcaccccattcaagagtagcagccatgttattctggttgtaatgggtatgctccgtgacccggaagacaataatgagggcaagttcaacgacaatgaacgaggatttgataagaaaacttgtcatgagcatgggctgccgcagggcatgtgcgatgcccagatagatataatccaagcacatcaaggccgcgctgacgagaaacccgacgctggagctgtcagtacattgtgacttaagaggtataccggatatatcgggtatagcggtcttggcgagggacatacataaagattgtcacgcagacatcgtgcatgaaatggtgggcgatgttgtcgaggacggatagcataatcaatccgatactcccgacaactgtgaaaaggaatgaaccgtgcgtgcacgctttgctgatgtatgacttgttttgaacatgttggtagaaagagaggtttagaagtaggactgttgtgatcgatccgatcatgaataagggttttaattcctgggctccaatatctgaaatgaatctgttcaaagatgttggttaaatcttggcatgattgaggatgaccaaagaaggcaagtgctcacggtatattctgaccaggcttcatcaagccatatctcggttcaccgatcatagtccagtggcctaacatagtgagtagcattgctaaatccaatgttagcatattgctcaatgcgatcgtggaaaattcaagacctcacctagccaagtggacgcggctacggccggaaagacccaggaagggaggaacattataatgtgtgcgtatagctaaagagtgtggtttggagcagcagtcatagtcttgttataacgacagtatcaaagagcacgggctggtgaagttggataccagccacatctctttactcaagtagttgacaaagagagaaagtgatccatccttaggttgggaatcaggcaacaaatattgtgcctgtcgatccctgcccctatgacgagggtcagttatggtatgtgggtctattaaggaattggcaaccccttgatcgttgtttcgtgtaagaagcacatgtttcgtacatgaaaggcacaagccgggttacagaattagcacaaagatggtgtatttatgtcgctttcatgaaacttgggaggtagataatgaatttggcatgctttgactgatatctatgcgtagaatgaaaaatcagattgcttgttgctccactgagctccataaaaaaaaagggaatcgagaacctggttacatatcctttagtaccattggtggggccggggctgggatatgtttgtcgacattgggaaagcaaagcatcatgtacatcgcaccgtttcgcacgtatcaaatgtggagatggaagtgatcgcctcgtggatgatcaaagcttgtattctcactgtacctgtcgcctgtagtgtatcagagttgcatcaaaggccaacgtatatcccttggcgaggatggaagggaccggggtctggaaggaaagtcctatgagcatttcacggatctcaaatcccggtgtaaagacgagagcaaccgagagcaaccgagaacaaccgccgctcccgtgactacggttgtacctgtaatatgatctcaggtaccgatttgggagagaaaccaataagcacggagtatctgtcttttgatactagacgtgtcaaaggggcatatgtgaggaagcagacaggttaagaggtgggacccaggatacacctacatgagttcgatgctcatgatgaggtatctggctggcacgttgttccgacgtttcaacctgttttaacagcacggcaacttcccggtcggacaaggggctggggtctgctttgttggccggtagggaatgcagtcagtagaggtacctagactgaaaggtggctgggagatgttctagtgatatgtcagtgactgtaattccacgacaggtccatggtttggctgtgttggagctccattgagatgaaacttattgatagcgtggtgttcggttcgaccagccggctgagtagacaccggcaccggcatggagtagccgaatgtgtacaggagtacggagtagagagtggatgaccgaggggtattacatcagtggggcagtgttgaccctacggcgacatttcaaccaaaaaccgataagaaacgcggatgaagatagtttatctagcagtgcaaggagtttcaaggagagaagtgatggcagcaaaaacaacttcaataaagactgcccaggtggctgccgtaaggggggaacagtgggccggctggcaagggcgaaatgtgatgcgacttacggacgcgtcagtcaggacgcgacttgttttgaaaattttcttttgaagtttatggattgtctaacaagatcatggaactatctaagcgttatctcttctctaagagccaccgacatgggtagcaagtagtgaaaagactcaagatactcgagggtgaccgaagtcgcccatcgaagaatcaaattcaaactcgaggactcaagagtcaaggagttgaggcagtaatgtttcaaaaattcccaagcgtgcggtaaagctcgcttgaagcagtcaatttggtagttttcaactagcaaaaacacgatctcggatgtctcctcactgatacgtgtaaaacccatgcactaggatgaagaagaaagaaaaaagaggaccaagtttgggggggagaccacctatttatattttcctattggctgaaggcagcagcaatgaaaaggtaggtgacgagctcggaataaaggatactccgaagcaaaatagccgtgtgcagccgtggatacccggaaatatcggagttaggcggagaaactatgaagccgaagctagatgtgatatatggacgaatacggaaggcggtatgtagtgccaaaataacgcccaggttacagggctacgaaagcctacgatgctgatgtagggtacagggaggcttacatggggttactcaccgggattcttggcctgaagctcaccaggcctaagtatataccaagctatggagtgtagattcgaagaagggctgattcttgtgaaatttggtgttaatgcgaggtggctgtgtaccggaagctggaaatgaataggataatttgtatgcatgtatgtagtgtatgacttttagcttcatggatggaatatgcgtgctcatgctgctcatctactatgtaccaggcctgggcaagattccctattgctccataatcacttgccattcaccttcggaggggttgaatcacgtggaagatcaccgggaacagcttgtctctcagttcgatttcgcccggttttctctgacggttgtctctatttcgctgcatcgttttggaacaaagatttatattgcctcaaaattttatatattgcatcccgcgccgagataaagagctcttatctgaagttctccacatggcgagactcggtaacctctccagtcacctccgagcatatcaaccgaaacccacctgcaatggaagtagtgcagaaagaacacagccgactcctcaagaggaccgagggctctcagggcatcaagaatgttcagtctgcaatcgattcacttcagtctgctcgcgatgccatagctgctggtcagtagtaaacgtgccccgccaggtttctcaactgacgacgtcgatttctccccaaatagatccatccactgcctctgccactctagccacccttcacaactcggttaaatcgtcctttgactctatcaatgccagcttgaaagagactcacagtggcctcaacaagtacaccaaatcgctagataaggtatccagaatactgatcgtccatgcgttgctaccaatctaacatctggaacagctgtttaaagatcgaccactgcctagcaccgacgacgatgacctctcttcacacgaaaccctgatcaaccgcgctatcgccatgcatctccttcgcgaaggtcagttcggcgtggccgccaccttcctctccgagattgccgaggagaagagaatgtatccagtctcccagaacgagcgtgtaccgaccaatacaactgcgagcctgctcgatattgacgaagtcccttcgaccgagatccggaaacaattcgcctcaatgtactatatcctacaacaactacaagagaacaggaacttactgcctgcgatcgaatggtcgagagaaaaccgcgaggcgctggaagcccgaggcagcaacctggaatttgaactctgtcgactgcaattcgtatggctgtaccatggcggagcgaacagccagggaaccgcaagcggatggctagcagcgctcgagtatgcacggcaggagttccatctcttcgtgcctcggtatttgagagaagttcagcagctagtgggcgcaatggcgtactcgtccaacctcagcgagtcgccatatgcagctctcttcaacaatactagctcggcctgggatgacgtagctcacttcttcaatcgtgagttctgttcattgctgggtctttcggcggattcaccgctgtatattgctgctacggcgggcgcgatcgctctgccgacgctattgaaactacagacgatcatgaagtcgaagcggacggagtggacttccgacaacgagcttccggtaaggaaaccgctactctgtgtacgaatcaacactaatatctgtattttcaggtcgaaatacctctccctccccaatatctcttccattctatctttgtctgtccggtttcaaaggagcaagcgaccgatgagaatcctcctatgatgatgccatgtggacatgtcattgcgcaggaatcgttgaaacgcctgggcaagggtaaccggtttaaatgcccgtattgtcctagcgaaagccaccccaaggatgccaagaaagtattcctgtagtgtaggtctttctctttctttctctttctttctctttctttccctgtcctcatatctctgggtatttttctttccatggcaaacgtcgatgagacacgtcttcagggagccgggtcttgccaggggcgttagcgtcggcgttcaggggcttatatgttgcggcattgcaatgcaggtccattcaaagctgtacgaagcactgcaatttaattcaaacctgacatcgagcataagcaagttcaaggtaaaataacaatctcaccatagctgtttcccaatggacgtatcaattacaacaaagaaaccatcagaatctgcgtcaataatccacaatccacaactatttcccaaataggaaataccaatttcctttgtctcgatggcggcatctgattggccaaatctaggcccgtgaccacgcgccgatttggcgacttaaaaaacccctttacgcggtcgaaactagctgtgacgcgtctttcgccgagccctacccctctacgctggctaatgagagctattcagtcgatcatctgtatgcaacccgtcccacgtcctgtaatatgctcagaatacaataatagatgtacgatgtgacttgtctccgtaacaaacgggagcttgtagtcctctctgtcttttataaatactgccacatctgcccctgaatccatccacagctgtctctatattatccccaatccagtctcctatcctatccagtccataatataatagcaatgttgtccaagagaacaccagagactccaattcctggccggtatcgcgcggcaaaagcttcagctttcacgctccagtcgcgccgggttcctcgcgacagaaccaaagatcgagtgcctaaggacaaagagcgagagaactctggctctggatctggttccggctcaattcggagtaagactcgacgacttgagcagcgtcgaagattcgacaaacccccagacgtaacgtaagtccatgcccatgtatctccatctccatctgcgtctacatttcatcatcaccatcatctgcaccaccaaatcattaatccaaccgctaacccgacccccagaacacccccaacaagtccaatagtaatgctccgcgtgggccccgaaaaccgcctcttcgccgcccacgaagccatcctctgcgcatcgcccttctttgccacgcactgtacagcccaaacaccggacccgaatgcgccacggcctagactccccctccaaccggcaagcaaacgcattgacctcccagacgagcaagccgaagttttctcctgcgtcctcgagtacctctacaagggcgactactacccgcggctgcgacacaacagccgaactcagacatgggagctggaggacgccgatgccggcgttggcgcaggcgccagtggagaattgggacaggcgacggcgacggtgtttcatcatcgagcgcagggggtgatattacgggatacggctatttagtaggttgaattttttttcttttacttattctcatctggctatgaatgtgtgtgtactaatgtatgtttcgacagctgcgcagcagagaaatacaaactcccccgtctccagcgtctcgcgctgcgtaaacagggcctgcacactgggatccagtgcagcacgatacttgcaagtgctcggttcgtgtacgaaaacacgccggatacggagtcgaagctgcgggcgcattaccttgcgctgattgtgcggtcgcggagcacttttatgcgcagtggaactatgcaggcggagatggagcgtggggggaaattgttttttgatctgtttgttgctttgtgtaatcatatggtgagtttacctttctttgcgcttggggatgaggtgctaatttggtctacgatataggatgaccctactggtcagtcggttgatagttcagctgttaccactcattgttagggatggtcatagttccggattaaggtgggttgttggctttttgactaatcgcgcggttttcgtcattttatatcgctgctggcagtgtttcatacccgtgtaccactatgtttcgatacctacagaatgaagagtgtgaatcaaggtgtaattctcgaaatgattgattcgtaaattcgtaaagataggatctaatatagtccagctagcccagttttgatatatctcgtgtaccaggccagcgtgaactggatgacactgattaagctggcgcttcgatccggccgatgaccaagtagttgctagtgtgcaatttgtatcacgtcaggccaaaattcttcggcagcggtgttagctcatgagcctgagtatcctggtatgtcgaataatatagctgcatgaatgtaagtcataggcggatgtgtgtatacctgaccattttgaaggtcctggcgaccaacgagggagttgtccatgagcattagacgaaatgaggttcaaacacgttgcagtgcattgccacccaaaagcgtaattagacacctgtgcccgggaaagcacctcccttgctcaagacgatgatgcctcgatcacgtgcgatgtatcctttcatgagtccctaaggaggcgacatgtcagtaaacacttacggattgattatacttgtcagcctaccttgtagatgagattggaaagcagacactccacctcatcaatatcgatgcgcgaccggccacttgtagaagtacccacacggagagctgcggcaaattcattcacatgcacacgagtacgccgaaccggagattgactctccttgggttcgtcgaaaccaccagcgaggaaaacttttcggaaaaggttgcgcaaggcaatatcacgtccacgttctaacggcaggtaaatacgtctcttgacaaactcttcctcgccgtcagacatagcctggtcgaatccaaccaagtcgccttttcggatacagttcgacagagaccggaaaagcttctcgagtcgtgggaatggcgcgagaagttccttggtggggagcgtgtgtgtggtcaccaggtgacagggaataaggtaggtaagaatcaatctgatagtggttagtgaaagcccatatatagctggagggctactgactctcgattcttggttgcgtctcgatgacacatcttccaagcccacgttagatgttcttcagcctataatgcaaataatcagtcctggtgatggtccacggacacagctcttgctaatacctctgggtaattctcatccaagaagtggatgactccaacgtaatattcgaaggtgacaatgtgagctttagggaatgcttcgggagggggaagatcagccgatgaggctttgatggcgcgaagcaagtttttggtaagaccgacggagttgatctaaaggagagagatgaacattttccgagcgacagtgaggttgacatttggtaccttgaaatacgtcttgaataggagattggtcatgttgtagataccccacttacgggactcttcagggggtgctctggatctgatcagcaatggaacaactcaaataatctaaccatatccttacctatcactcaggcacagagtgaacatccggttaatgacccgagcagcctcctccaagttcgcattcttctcaacatcagctgcgatgtcatcctggaacccaaatccagtggagccttgggatgctgcttcaagatcggcattgatcgcgaaagtacgcaagtacttcccgactgtgtacaagcatggcaatgtccaagccggaatgccggcagagcccgagtatccccggatgagggcattggcgacctttttccaggcattgaagactgtaacaacactagcacccggaaggtgatcttcacaccgaagtatttcgcctatagcttcccagtaaacagcaaagatgtcaacccaggcattttgttcggccttcggcaatttcagacttttcccatggaagagagcgtagctgagatccttggatatgtattcggcgttggagaactggtaaaaggagcgcagccgatcgcgatcttcggacggcgcgatcggggtgagcacagcagctaattccgggccggacccgttgaggtatgcgttcttgaatgcggtcgggagagaagtcatggtgaactaccctctggcgaaagagcgcgttgattaaattgattgtcaatttatgagttgaaaagaagcattcgaggtggggaaagggttgagatccgaactgaccaagacaagcaagagtccatacttttggagaaggcatgtggggaaggcgaggcaatgtggctggtgcaatgtggcggaagaggagtggcgcagtcagatggctaaatgggactagcgcagaacggaatgcctccactcgcttagggcaagggcggcaaccctaagcacaattggaacctcacaattctcattttccatcgacggcacactaacgactcatccaccacagcgacaatcacagtgagtacttgccgcttgattttatcggggatttatactaacattgaactcttccagatgggtgagtgatttctattcccttcccgatcccccaggtctttttttcgagacaacggtgtgcgcatattggttggacgaacttcgagacgcaaagaacacccacgatatcgcatgatgcaatcacaaaagaggaggacgcaatggcaaatcgatgtcgcttggaaatgtttatgaaggaacgcacaacgctgtcgatcagggctacgcatggttgaatctcgaagttttcaatatccacatatcacccttgctcttctcgaattttcgccaacctgcatcgcgcaccgtttcatctctcgaactggacatctgggcaattggaatatacactaggaactatggctgacggattcccagggcgtcttactgagtaccaggtcatcgggcgtcacctgcccaacgaggcgaaccccacgcccaagctgtaccgcatgcgcatctttgcgcccaacaccgttgtggccaagtcgcgtttctggtacttcatgtcccagctccgtaagctcaagaaggccaacggcgagatcgtttccctgaacgtggtatgttgggattgaatattcgaggatatggaatggtactcatcgtctcgtgtctagatcgacgagaagcgtcccctcaaggtcaagaacttcggtatctggatccgctacgactcgcgctccggtacccacaacatgtacaaggagttccgtgagatgagccgcaccgacgctgttgaggccctctaccaggacatggctgcccgtcaccgctctcgtttcggttccatccacgtatgttgcgctacccgaaccttccgacaatgaccatattctaatgattatttccctgcagatcctcaaggttgttgagatcgagaacaatgacagcatccgccgcccctacatcaagcagctcctccagaaggacctcaagttccctctgccccaccgcgccggtggcaaggtcggcaagaaggtcttcgcctactctcgcccctctacctttgcttaaatgtgatgtttcgggtgttgggtttggagtgtgtggatgaatgactgtttatggccatagcatgcatgaaagatggtcatgtggaaaccaccgccccgctcacgggcgagatggttggatgtctctagtcccccgtatggtggcatctttaggttattttgaaaaaatcatcgggtttcttgaattattcgagttctagtagcacaatgggcatacatggagagtgcttatttgatagatgccaagacatcatttcggatgtatcaacctgcaatgaaggccttctgattcctgtcaaagtctgtccattcacaaagtggccgtatggttgtactgttacacaaggtactcgttgcaaatcgcttactactggccatatatctcattgtaaactacattcatatagatccatgggggtcaatgctccatataaaatactaatcgatcctatcgccctctttacattgcagtttcggtcttgaagtaagggttgttttagccgcgcctgggaccggcttggatgccttgtatatcaggcacccacgtgctatcttcaactgccattttagttgcaagtctttgattggactggcaataaagactagctacttgaagtatcttatgactatcttcaagtttacttaaacagtctttacagaaccttggaaaacattggtatgtacaggtgtccaggaactattgcgtcattcgaaatcaggtcgggagggagctgtccgctttcgcatatgtaatccaatttcttcggggccttcccaagttcctcgtttccctcttaccccattccccaagtcattgcaatcatgtttgctcgtcaatctttccgttgtgtgcagcccttgaagcaggtaagttgaaaagggttctcaattgaatccccatactaaaaccgttcaatcagggtttccgcaaatactctgcggaggccgctcccaagaagtccaacttggcccccatctacgttggtgtgggcctcgccggtctcggtgctggtttgtaccgctacagcaccggcgcggtcgctgagcccaaggaccgccccaaggtcttcaacggcgaggactgggttgatctcaagttggctaatattgaaatcctgagccccaacgccaagcgtcttcgcttcgagtatgatgataaggaagctgtctctggccttcctgttgcttgtgagtagtctgactccgagcatggttaccaatcaatcactaacaggaatctagctgctctgttgactcgtttcaagcccgagggtgccgagaagaacattctccgtccttatacccccactagtgatgagggtaggaaatcataaaatgcgacttagttttcaaatgctaacacatagcagatatccccggttaccttgaacttgttgtcaagtcctaccccggcggccctatgtctgagcacatccattccatgaacgtcaaccagcgcctgtcgttcaagggtcctcttatcaagtatccctgggaggccaacaagcacgaccacatttgcctgatcgccggtggtactggtatcaccccgatgtaccagctcgctcgtgagatcttcaagaaccccgaggacaagaccaaggtcactttggtcttcggcaatgtcaccgaggaggatatcctcctgaagaaggagctgcatgatttggagaacacttacccccagcgcttccgtgccttctacgtcctggacaagccccctgcggagtggaccggtggcaagggtttcatcaccaaggagctgctgaagaccgttctgccggagcccaaggaggagaacatcaagattttcgtctgtggccctccccccatgtacaaggctatctccggtgctaaggtcagccccaaggaccagggtgagctcactggtatcttgaaggatctgggttacagcaaggaccaggtcttcaagttctagattattgtagagaatttagctagaatatgtcgctagttggctatgcgacaggatagccatgtatattggtgcatcttgttttcggcgtgttgccgtgtctctggctggcttcggacgtcatattatagaagaaatgcattttgcttccaaatagataatcatgtttatctggcgcttgtggttatctctgtcgcattaacaatgataagaactacataggtagatattaagagaggaaaaaagcatgtggaccataatgaagatgaagatgggaagggtggtggatatatatgtgtacaccaactggaaatacttttgcagaatacgatatcaacagaagatggcgccgaagtagtgttaatataggaatacagtaaaacaaaggaatctacacctagaattaattgaataactgcctacatacatatacatgtacacaaagtacctagttattggtagctaagtgacatacattaccaggcactagattatagagtatactgaaataattgcgccggcaagaaaagaattagaaattcagtcaatgcagttttaatgaattgaattaagaagtcagaataggcgttcgtactacaagtttgacaccttgtgttcagttaggtgttcagctgagcccgggcgaccctgaagttgacatagcgggggggagtagaacatagcccacatttgaatatgtccagcccctcaaaaaagggaaaagagcaggaatagtaccaaggactatatctgtgacataacaaaaagatctggagaaatcaatagttaactatatatgaatacaatcaaattccttagcaagtatacaagaataactacatggccccataaaagcctgtcatctgggataggtagttacgtatttattatgaatttagcaatccctaaaatattatggactactatcaaaggacctatgaatgacatagtttaagaactgaaaggtaatactttatgatagccaagtgaatagaataacatatggaaaggactccggaggtgcactgtgttgcctggggttcccgggggtgtgtcgcatgacaaggcccagagcctaagcctaaagcagagcgaaaatgcccggggcacttcgggggtgccttttgctatttagtgggtacccccccccccccccccccccccccccccccccccccnnnnnnnnnnnnnnnnnnnnnnnnnnnnnnnnnnnnnnnnnnnnnnnnnnnnnnnnnnnnnnnnnnnnnnnnnnnnnnnnnnnnnnnnnnnnnnnnnnnnnnnnnnnnnnnnnnnnnnnnnnnnnnnnnnnnnnnnncgatctccggtcctcttccccccttccccccccgaaaaacaggaaaattctcttttcttcaccccaacccattctctcggcttcaaaacaatggcttccaaccaagatgacacgaccgttcaggtcaacaaagaagagctcagacgggccagcgacttggtaattttttccctctctttttttgctctctgacttttgtattttctgcatttcggttcttttcttctgttcttctgttttcttgtgcgcattcccaagtgcgcgcctgctacgcgtcgcgttttaggatctataaagctacccattaagctgttgaagcttagactatatcatctcatacttcagcatcatgttggcaagcttcatgtgcaaaagaaaagaacatcccctgccccttctcctctattcagactcgcagacccatcttgacatcgcgactttcttaccaacttacgcgcttcctgactacccctcttgcttccctaaccatatacccatacatatacacaatgaataagcgtaattgcccttgatataacaccgctaacaatgcctcatagatcgtcatgcgcctcatggaggtgcagtcttacattgctgacctaggcaaggcctacgtccagcatgtaaacaacatcaccgaaggacgcgatgccaacattgagctccccctcggtccctctggattcatgggcccggattttcttttccgtgccggcagccccggtgctaagtctgaggctggtggccccaagaagcgcaagcgcgcgcccgtcgaccccaacgcgcccaagcgtgccttgacaccctacttcttgtatatgcagcacaaccgcagcaagatcgccgccgacttgggcaatgatgcgcgccccaaggatgtcgccgacgagggcacccggcgctggcagagcatggaagatacccagaaggaggtatgtattggcatcaaatcagttccagcttagtattgtactcaagaatacagagctaacacattcgcataggtctggaagaagatgtatgccgccaactacgaccagtacaagcgcgatatggcagcctacaaggccagcaacaaggttgaggaggaccacgatcccgcagccaaccaactgcaacaggactttgccggtgccgagcccgaggctgaggctgaggctggggtcgagggtgaggctgagcacgaggagtctgccgaggagtccaccgaatcatccgacgagtcgcagtccccgtctcccgtgaaggaaaagaccccgccgcgcagcaccaccaagcgccgccgcagtgataccaaggccaaggaagccgagactcctgccaagtcgcctgtcaagcggggtcgcaaggctgcggagccggtgtcaacaccggctgtcaagacaccggctgaaaacaagcgtaggaccaagaagcgcaagagcgaggtgtaaaggagtttgtgatgctttctgctttctgatttgcttgactccggggtcagatgagatgggtatcggtctgttggattggatgtgtaacccctcggtttgcctttttcagcggcgtttggagaaaaactgtacctatttagcctgaacgagtgaaatggactgatcataggacgtggtttctagatatccccatgagttctagtatctatggtaggtcagggctaaatagtaacccgtggacatacaaagccagataaaagaaaaacagactagatctcactaactccaactaagtcccagtgcattaattacatgtaggtagttgattagttaactatcaatttagcaaagccttgactaatgtcgctaacctccgttccccggcccaatcggcctccacggtcacttatcatgggcgatggccttatcagagaagaaagccctggacgccatttgaaatgtaccgcatccccacattcctcgcttttttgcctttcctacttagatctccttgaactgcatcttctacaccttcactaactcttgaggtttcaaacttgctcaaacagcctgaaaattcagttatcctgcacgccaagaactgccaggttcaggttccacatgcactatgcagcttattccgaaggaggcaagtcgcacatacattcccccgagagacaaacaactaacacccctgtagcttgacaagcttaccatcgcccacctaggcttcttggcacagcgtcgtttagcacgtggagtgcggctcaaccatgcagaagctgtggtatgtgtatcttcaagaggtgtaggacacgaccactaatatcccccaacaggccctgatagcctcagtgctacacgaggtacgacaaacgcatccaatcccctacaatgatatcaggacatactatatctccaattgattcaatgcgcaaactaactcaaacccccgcagttaatccgcgatggccagtactccgtcgccgatctgatgtccatcggcaaaacaatgctcggccgccgccacgtcctcccctccgtactggcaaccctcgtcgagctccaagtcgagggaactttcacctccggtacctacctggtaaccgtgcaccacccgatcagtagcgacgagggcgacctcgagcgcgccctgtatggcagtttcttgcccgtccccgcgcccgaggcattccccgacccggacccggaggatttcatgcctgagaagatgcccggcgcggtgattcctgttaagcatgcgcgcgtgcagttgagtgctgggaagaggcgtattaggcttaaggttatgagcaaaggggatcggccgattcaggtgtgtacatttcattcaatttacacggcgcaaaggcaaaaaaagaaaagcggagagaagcaagtgatgctaattacagtgttgattgccaggtcggatcccattaccatttcatcgagacgaacccgcagctgcacttcgaccgcttgcagtcgtacggtttccgactggacatccctgcgggcacatcgatcagattcgagcccggtgatacgaagacggttacgcttgtcgagatcggtgggaatcgcgttatccgcggtggaaattggctggcgaatgggccggtggatatgagtcgtgccgacgagattataaccaagctgcagatagctgggtttgcgcatgtgccagagccgcaggcggatagcgcacttgttgctggattctcgatggagcgcgaggcgtactcgcgcatgtttggtcctacgacgggggatctggtgcggcttgggttgacggatttgtggattaaggttgagaaggacatgacgacttatggggatgagtgttcttttggtgggggcaagacgctgcgcgaggggatgggccaggcatctggtcggtctcataccgagtgtgttgataccgttattacgaatgcgttgattatcgattggactggtatctacaaggctgatatcggtatcaaggatgggcttattgctggtattggtaaggctgggaacccggatgtcatggacggcgtgcatccggatctggtggtgggttcatctacggatgtcattgctggagagaacaagattgttaccgctggtggtatcgacacgcacatccacttgatctgcccgcagcaggtggatgaagccctagcatcgggaatcaccactttcctcggtggcggcactggccctagcactggatcaaacgcgacgacatgtacaccgggaccgaatcacctgcgccagatgatgcaagcatgcgatagcctgccgatcaacatcggcatcaccggaaagggcaacgactgcggaaagaagagcatcgaagagcagatcctagcaggcgcagcaggcctcaagcttcacgaagattggggctccaccccagcagcaatcgacaactgcctcgaagtctgcgacaagtacgatgtgcagtgcatgatacacacggacacactgaacgaatccggcttcgtcgagcagaccatcgaagccttcaaaggccgcacaatccatacctaccacaccgaaggcgcaggcggcggccacgccccagacatcatctctgtcgtcgaacaccctaatgtcctccctagcagcacaaaccctacccgccccttcaccctcaacaccctcgacgaacacctcgacatgttaatggtctgccaccacttatcgaagaacatccccgaggacgtggctttcgccgaaagccgcatccgcgcagagaccatcgccgccgaagacgtcctccaagacctcggcgcgatcagtatgatgtcctctgactcccaagcaatgggccgctgcggcgaagtaatcctccgcacctggcacacagcgcacaagaacaagacacagcgcggcccgctcggaagcgacgccgacagcggcgcggacaatttccgcgtgaagcggtacatcagtaagtacacgatcaaccctgctctcgcgcaggggatgtcgcatctagtcgggtccgtagaggtcggcaaggtagccgatctggtaatgtggaagtcggcgacattcggcacgaagcctacatctgttctgaagagcgggatgattgttactgccgagatgggagatccgaatgcgtcgatcccaactgtcgagccgatgattatacggccgatgtttggtgcgcgcgtcccggctacgtctattatgtttgtttcgcaggcttctatcgatgcggggattgtacagacgtacggattgaagaagcgcattgaggctgtgaggaattgtcgttctgttgggaagaaggatatgaagtttaatgatgctatgccgaagatgaaggttgatccggagagttatactgttgaggcagatgggatgctttgcgatgcagagccggcttcggagttgcccttgacacaggcgtattatatcttctgaggatcttggtggcttctttctgttttgcatgcttttagcttttccctttggtctttacagcttctttatacctcgttactcttctgagttggacattttgcacgatatggatttctatattctaacgaagcgattttcttttacttttacttttctcaaacggcacgtaagtcaataaggaaacaatcatggatcaagcgagctatctttttctccttttctctcctcaaaaccctaaagaagccaaggtcccctcaatagaatcaacaacaatcctatccgtcctgcgcccatcagtattaacaagaatatccgcccagtgcaacaaactagcaataagatcattgcacatgaacggcacattatggctatagaacccgtacggtttcgccaggacataagcgttgccacgagcatcaacagccatagccatagaggtatccttgatccgatgaacactagtaacaagctcacgtagactctcagaaacatcctcataagcctgggggtccgctctcagcaccctcgcctgcatccctaaaccggagacaaacgtcgcgcgctcacgtttaaaagccgacacagggccaggtcggggaggcataatagccatagcgtcgtaggagagacggtaggtcgaatatacgagaaacaaaccagtagtaagtgataatccaattccagaacctatctaaaagcacaagttagccacaatctgatcaatcagtctcgccacagcaataggaacgtcagtgcaaaggttatcgcgcagccgatccgcaagataggcacactggcccttgatcgcggcgcagtgcataggaacgaccgtctcgtagaagccactctgttgtactaggacgtagggatggtgacggctctcgacggccatcttcctcgaaagagaggcgacgatgtcgatatgctggatgagctggaggcggaggttggggatcacatacgcacggctgtcgatgtcgtggcgtaggaaggtcgattgctgctctaggagggtcacgaggttgtcgcgcgccttgcggaaggcggagacgcgggcttggtttatatgcgccatggtgatgcgaatgaggggattgtgggggctatagatctagatggaaatggaaatgttaatgtgaatgaatgtattggaacgtacctgggtctggagctgagatacagctacagctatagctacgccgatgttgatactaatgctgatactggcgtgagtccgcaactcgacggggtggaaatgaggatctagatgtagcccaggttagccagtgcatgttccagatggagtgcgatctcgtgctcggtgttgataatgggacggtggatgtggtcatggaggatcttggccatctggagggtatcacggccgaccatgtcacagatctggggaatggtgcaggtgaagtgggcgattccctgggaggtgacatatttcatgtccgcggcatcaacagcgagggcttgggaagcccacttcaccttgtcagcctgaaccttcagggactggatgttgagggcgacctcaatgaggtagttgccctcgggcatctggcgtaaagtggcgatataggaacggatgttgtttactagaataccgcgctccttccggtacttgaaaatagcccgagtaccacggaaaagtctagtaccgatagactcaggcattgtggatgaacggggaggggctgatgtcctctggtgatatagaaagggagagatgaatagatgaatgggatgtatcacttacctgcttagggctagtggattaagtgtaaagctgagagtagagtagactgaactggttgtactgatggagaaagaactgtgaggcggatgattcctcgaaatgtcaaggaataagggcctatttatgcatttgcatctcactggcttgaatagcctgtagacaaggccttcatcaagaagaaaggaatgaaaggcatatgacttgttgttgaggaactttgttctctttgtcctcagatatgtaagtagtcatgatgttgaaagaaattagtatacaagggaaggggaaggtagttgcagggtagaccaaggctttgttataatattagattcgtatggccattgttcagttctttgttctctatagtggaatcatcaagaaaattatgatattgatgctttactcgcgccaggtttttagggtttgtctcgacaatgtagggtcttttattggtggaccaaccttgctgtttataggcccacaaagctgatgtttaagggtaacagtgcagagtaagtgatgtattaatctggagcacgaaaatacttttgcaagtcagtgatccatctaggcaattctatgaaaggaacagaaacccacgatggcatagttcctgccattggcgaaatgctagatggcaagatcgagaaaaaaactcagaggggtatcatatatagtaaattgaagaagatagaaaaaacaaaaggacacagatccatccgcctaccaatatgaataaattatcaagcctatagctcaatctcctcctcaccatgatgatcacccgccgaaagaattgatatattcgtccaagctgagaaagtaccttcgcgcgcagctagataagcagcaacacgcgcatggcgtgatcgattcagattttcttctcctcgcgctgggtcccgtagcctatttccaacggaattttggtccggagagtcaaacgctgactcggagatggagagagcaagtatgtctgtgtgttgactgtctgttttttggttgattggatgaggagatgaagtaccgtcgccagttaggtcaatgatccctgtagatgtgcttggttcggacctgtgtcggagccctctagccgaaggttctaaatatggctggtcaggtatgagcgtatcctcttcttcacttccctcatcactggccggatcaaacctgtcttcctttcctgtcggccatgtagacgggagaggattgacttgaaacagtctaggctctgcatgctcttggagatatcggtgtgcttgacggatttcgttgcgtttaactctggccgcctcttcgaattgactcaaacgatgtagagagtcctgcttctgatcaggatgacggcttgcatcggcgataccaaggctcaaatcttcaattccactactggattcttgtgtggactgtgtagagaggtccatgtcgtaccgggccctttttcttgcgcgcaaatctccctcgccatcaacatgattagctacaatttgctgcatgtaattgtcgtgtgaaaaatcggttcctgagcagaggtggccaaacaggcgtctgatggagatgtcttcgttccaggtcgttggatccacggtgcatggatgaatgtccttgggccggaaggcagctacgagctcacacagttcggagtaggaagagtgtcgtgaatatgggaaccgctataatggcattagaggattatcgaagaaaacagtagtgccacttactatcgtgttgggcaggtctgtctgggacgaccggctagatgtatcagatggaccatggcttagagcggtcaccagattcttcaatgagatttcaccttcctccttcacgccatatgtatcaagcgagagcgccttctttctcgactggaaagcatccataagggcacctcggatctgagaaagggcttttttgtcctggacgtgtttgagacacagcttctctaactcggccaatgtagattcatctggcagctcgagttcatgagtttgatacaaatccccaataccaccgcccgcaccgacctcagggatttccgcaccgccggttgtgcgattcacaatgggcacaatgtagaccgtgttagtgccgcgagctgccaaacatgagaccccaggctcgcaactgtggattcgactcgattcgtcgttgcttaggcagcctgttacagctctgtttcctagctcgaagccacagagagcagggacttcaccaacccccctattgcctggagtctggactagagaccgataaagtcccatctggtaacgatccacatggatctacgctaattagcgaatgctatgtttgagcggcgtggtatcaatcaccttcgtgttcagcgcagctgagagcgccatccaaacatcctcgtaaccgaatgtccacgcacggaagtagaagactgtatcatcaggataagcctggactttttgcagcagctcagacagtccctcggccttggaagggaactccaggaatgggtttgtcttgcttgcaaatgtagagtccagatacaggttatccagccgtttctggcccagagtatacggtatcaagaccgggtggcggactaggctgctcacccaccatgtctcggctgagaataatcagctagtagttcaaccaagatgagacatcattgactcacctcggatgtcacctgtgtaaatgattgccttctcgtccccttgaattagaaacatcacagccccagtgcaatggttggcatcaaacaacgtcactctgatatgacgtcgaggagtgagttcaatttctgttggggtattcagtggaattgggcgctgtgtgggatgagcacctggtcaactctagtcaaagtgtagaactatactaaccagaagctttgcgagatgcttatagtgcagtcggcgtgactccaagatgcctttattaaagttcatccgatggggatacttttcaattcggaggagtagctgcgcatggtcagtttaaagaatttaataggatacacaggagcgtgcctctcgcgtggctggcgagcagtagataaacggtgcccgaaaggactcgaggccctgtaaatgatcgctatgcacatggctgaggaagcaagctagtggtgccggccgctctgggcatttccgaaaatagtcaactgcttttcttagccgtaagtttggctgatttcataggtgaagctcactgcgaatatccggaaactctgtcggatgattagcgtgggcagtgacgtggaagtgccggtctcaccttctacgatgccattgaaggtcgacatggcaacacattcagaagctgaggtcagattgcatgtccaaggttgcccaggtgaagatgtgctagactgctagaatgctaaacctgttgcttgcacgtgatgtgaacatagaaccgaaagggtcataaaacaaatccaaatatgtccaatctttgtataataaaactaattcagagcattatggttcgatggattatattgcatagttaaatatgcgaagttcaagtccaagtccagaaggaatgtgttctacgccttaacagctggccgtgcatcgtggccatgccatgccaacgcacacttgggaatcttagttataaagcccaagacctgttgtctcttcccaaactattctattttctttctgtttctttccagtttctattttccaccttcttctgcaattgactatcaatggtacgcctgtgagaccttcaattcccccaagggtcaaagagccgaaacgtcagctggggcacctgatcgagatttctcttctcttcttaattattatatccagtgacttgcattacgggaaatccaggttgaagaagcatttctgttgtattctcaagaatttactatccgcgccgtctctagcgttgttaccccccactgccaactgaagctctcctcacccccaaaacatccacgtccaaacgtccgggaatttgacaaagggcaaggggggacccttcagggctggatatcccgaatcatcacattccagggtgcctaggacgacctcgcctcttttaatttgctcctttacctcttaactccctccacatccgaccttcaccatgcgtaaaccgtccgtgggtcaaatcgtgtataacgccacgtttccacgacctcgtccaaacgacccagggtcgtttggtgctcacattacccgaaacctcgtcccagaagtacgtgtcgaaacatccctcttctacggctcgctagactgcatcgaagcacaatacccggggctggactactcgtatggaccgcatcgcatgcgactgggtcgtttcccttggcaccgaaagctatttcaaacttttgaccaacttggtctgacagaggaggagatctccaatctgtgtcgatgggaagggaccaagtccgcgcgtcagcggtacgaggcagaagaaggcatcactgtacaggacactacagcccactcggtccgaccggcatctcctcaacccgccccgtcaatcgagatccacttcattgactgcgacttctgcgggacagaagaggaagatgaccagatcatcgagactcaaagcaatgacacggtccgtgcgatcgattcccgagcctccagttaccggtccgccgaggagcacgaaatcgaagaggaactaagcgacgaggaaatggaaagttgtggcgtagccctcaacaaccgaatccttgctgcgatggccgctcgcgaccaaggcactgatgtgccgctggatgaagactgggaacaatggctgaaggaggctggagaacgtggcagtttcggtgagatggtgcatgctattcgcgcgaaccagcccttgactcttgtcgccgacaatgtccgaatcccacgcggtcgcggtgcggctcgtgtggtgacaagggcggccttgttcacagtgccagacagcattatcgcaacaaacactgcacttccatctacatccaaccatgcctccggcacggctcaatgactgcataatatttactcgaccatcagaccctttggatagagccctgttctgattcgtgttttgcatttttacggcgcatcttacctctctcgcattgtctgaagtggactggctccttcttctcggggttccctttgcttttctttatctatatccttacgacacccccagaagattcttttgcatacgcatacgcatagatttcattgtctcctgtctcattttcattaataccctcatgttcctactcctcatcatgctttgttgtttgactcgttaactttttcattatttgctgcgccggggatattcatattcaacgtgttaatcgggggattttcagcaaacagcaaaaattattctaacttactcagaaatatatttacgaatatcattcccatgcttgtccaatatatgagtagcgtacagctcgatctgcagactgaatctgccttggtattgaacattattcaaaaaagctagtttttggggataaaaagagtggaatcaaatatcatggtcctgtccgacacgagaaaaatcccatgctatgccctcatctttgttagtgccgaccacgagctttacgccgtctctccgcatcggcaagaatccactgccccgatttacgaggaggacatagccgccattcggatgttgtcgcacacaaaacgattcgtagtcccggtgcaacttagcctccgcgataaattcacccttgttgttacgcccgagaaaggtgccggaaaccacgttttgaaaccccaacaatctctcgtcggattcgacgcatgaccagtggataccacccacgtactcactgtcttcagggacaaggcgtaaaatgcctctctgaagcccaatagcaaggcctgtcaaagggcagcggatgatgaatgatctgcctttccaaggacaatgcctagagcgggcttcgatatactccataagggagcctatggattcatcgtcaagaccaccagatgtgggtgtatcgcatttccgatcttctgtggtagtggaagacatcgtttcttcgattcagagctagaagggaaggatgttgatttcctttcttgttggcttgcggctaagttggtcaaccttattttgtagccattgtttgagggaagactagggatgtttacagattaggagcccctgtgagatgtgtgtagaaaagaatatctttgaataaggaaaagcaagacgtacaacatggagtgagttggtagacaaagtgcggggatagctagaaactatgtatcacatgatctgagctttaaccgtacacagtctagcctaatttggaatagtctgagagacattgacttcgataagctctccgctccgaggtccgctccgcaactgatctccatgccatgaacatgaacatgaatctcatttcagctttgtgtttgattgaatttggccaatagcctgcgctgattcacaccctgcttagctttacacattcatatcaaccctacaacacagccacgatgatcaaggcaatcttctatagtaaatttgacacgatagagggtaaggaccttcaataccatgatgaaccttgaattcgttacatactgactgatgttatgcagggcccaaagtcgtccatcaagtccccgacggagctatcgtgccctccccaaccgcgccctcacaaccacccttcctcactttctccgatgtctccttcttcgtgatcccccgccaggagctctgtgggaaccttttgcaagtctgcacaaacggatatcgtatcctgggatacccaatatgcatgaagtctgtgcggtatgaccggaatgagttcatcttcaacttctgcatagtcctcgcagaggaggacgactttagcacgtataagagcgtggtgcagaaactagcagatctaatgcatggcctagaagagcagaatggtttcttgtcccgtgatttctcgaagagtggtgaagggaaggtgtatagtctctgtgagatgttgatggaggacttgaacaactattgcgagtgcatgattcccattggtatgcccatgaacctgtttagcgtgattccgctgctaattattctacccagacgatttaaacactctgaatatcaagcttttcccgatatacccttctcccccagccgtcaaggcctggcaagtgccgctcttcacgttgcgataccaggctttcatggatgagaactgggatttgaccatgcaaagggtatgtgaaagatgacaatgagacccccccccacccccatatggctaggaagacagcagctgaaccccggcagattgtaccacatatcaacggcgtcaacagcgtccgcatcatctccgtactagcagacacagacttctccctcacctgccgcgccctccgacatctcctctactatggctgtctattcatcctcgacatcttctccttctccgccatctacgccccaaccgcccagtttaccgcaacaataggctccgacgaagcaatgcaactagaatgtgcccgctacgtaaacctccgcttcgcaccacacccagcaaccggaccctcctcccctccaccccccagccttatccccagcccaagcgccaacggcagcacaaatggcagcttaaacgacagctccgaaacagctcagctctccagctcccttaccgacccaacacctagcctcacacgggaagaatcccgcttcgacgccgaagaaatctggcccctcctaggcgccgaagaaaactcttccacctccacctccccaaaaacacccccaaacacgctccacaaaccagcgatcgttgacggcgccgcgctggtcgagctatacgcaagcctaaaacaaggccagagcgtcaagcaatggtacgcaacgcacagtcgctcgctagccaacattgacatccgtcgcttcatcactttcggcgtgataaagggcttcctgtaccgcgtgcacaaatatgcctgtgcaacgagtcagcctgcccccccgccgcgtgcgtcctcgttcacgccaacggctctgtcgtcgcgcgtcaataccggcaccaatacaccctatgcgatctctagtgtgtcggaggacgcgtctatctcgacggctgcgaggagggagtctagtcgtgagcgggctgggtcggtggtgagtgggggtcggaatgcgaatgggagtgcgggggcgccgtcggcgttttgggacgaggaggatgaggttgtcggggatgaggctcttgggaagtatcttgatggtacgcattgctttgatcagatttgtacggagttggagatgagtgagagggagctgacggctagattgaagaggtatccctgggaggtattgattcttcatagatgagttgggggagtttttttttggcaggtttttttatattgtcggaattgattgataccctacttttgcgtttatatggttcccaaggtaccgctggagacttgaagattgggaacctttgtctcattgtaagctcacagcttgggacttaaggataagaatatatgaacataatcacatataactaggtagttagttatagtatgttgtggaaaagacccagtgtaatttcaggcggactacaaaatagccagcagttcaacatttgatgttgtggaacagaaaaaaaagaggtatccgctaacgccacgctagtccatcatgcatttgtatcgtatcgtgcaaaaaataagtcaaagttgaggtggctaagaggcagccaaatgatagaagacgggttatcttcgagtgatgaagatccggcagagaacggagagggaggaatcattcctcgtcccagttctcaagctcggctttctcgtattcagccatgacttctgggtcgaagatcgactctccctcagagggaatggtagtcttgatgtcgtcaaagataggcaggaatgcctcgttccagcgacgacgacggtccataacaatctttgcagcgtctccgacagcaggacgggatactcccgcagaaccagcgacgtggctgccgccgcctgcgccgcctggccgatgcttgggctgagcacccttcttgcttttgcccatagtgcgggtgcgtttgagataggcctgttggacctgagagtcgaggtcgtcttggatggtagtaaactcaagcatggccatgtgctcctgggcaatctttagaatgcgagctttgcgagcattgttggtgacgatttgcctcttgagctcgttttggagtaagcggagtcgctcagcaacttcatcatcgtagtgagcgtcgtagtctggattatcatctgcaccgaggaaaccaatgaatcgcaattcggctttggcgcgttcgtccaattgggcatgatccagctttgcgaccgaggttttgaagtcgtttggatctgcgtcgcggaaggtggttgcagcagggagaggcttgacttcgcttttgttctccttctcaacggtgggttgatcaatgtccattgcgtccttatccagcccacttacactcgcagtatccccatttgcggttggattggaatcctcgggaaaggtacggtgctcgtaacggaggagagagcagaggcggctgaggagaggtccaaccgagacttcgttggtttcggctttatcgtcagtcagctgttcaatgctgccacggccttgattcaaaggcagctggtccttgtcatcttgactcgagtcgtatgacactccatcctcctccgcccaaatttgacggtagtttttctttgcgcggcggggcatgatgaacggggtagtgcgatcaccctgtgacaggtcagcttgtgctgactgaaagtagctacaattgacttaccctttcttttaaccaggcaatgtcctcctcggtaagaggccggacgtaaggttcaatgtaagtctggaaagtattcgcgctgacttggttggaaggtttggcattgctgaagtccttatcaggagccacacccgctgccatatgagcaagatcggtcttagggaagtgagaaacgctgtaaatctctttcttatcatcgtccgtcatgcctgggagaacatctcgaatgttgtagatggtggggtcgtcaaacttcagcgggttatcgccaaagacttgcacctgaggaatcgcaggttgaggttcaggttggtgggaatcggcactggtttcagacccgggggtcccggggggagggccgtcaacagcagtggttgtgccattgggggacatcatcgatggaggtgaaagcgaggaactttcatcagatatcgcatttttggagtttttcgatgctggagaagccgctgttggtagttagcgaaggctgaacggtggggaaagtgaaagaagatcaagttgtggagatgggtcggtaaaaacaaagagttggaagaaagcgccgagttggatcttttcttacctccctcaaccttagtctcagctccatcctggcgtgctacctcatgtgcgccatgatttaacggccgctcctcttttccacttgggcgctctttccgcttcttcagcttcccgcccttatgaatatcgtcgtcctcttcggtttcacgtttcaacttcgagcgatctcgaacttcacgatcaagctcctgatcgtccacttccttgcgcttttgagacatctcgcgcattccggcattgcaaacctcgcctcgaagatcggccatgtcactaagacccttcaggtgctccaccaatgcctccagtgtttttgaatctggaatgttctgcgcggagaccaggtccaacacatcggagtactgcacgctagccaagtcaatgtgcttggtgacatcgttctctaagtagctttggataggtagtgatgggatagcgggagcactagcgctggacggggtggtattgcggctacgcgactggcgcgcatcgcggcctttgcctttgcctttgtatgcggatggcatggtatttctgcagaccgattattggacgaagcgaaaagaagagatgaattgattaagataccaaagacagcagtatcaacgaagagagagattgattgacagaaaggttcctaggaggtgtggatgggactagacagacacatgctgtcgtcggtcactgtgagcgaataataatgaaaggagattgaatgtcccctaaagttgcctgatcataagctaaagcagacacaatctctcgatcatggatgaattagactttctagaggtgatgatggttggcggtcgctggcggtcggccagaatatgcacgtgatggcgatccgacatgtatcatcacgtgctccatcttcaattcattggttcctgagcacttggctatggaactttgcctttgagcttattcaatttttttgcactgtatatacagcttgcacctcaccacttgttggctcacacatggtctagccgcccaagaatgtggttgaggttgaaatctgatacacattcctacagttctgcggagggagccccgatatcggctactccgacattctgagggatgaggcagagcaaatcatgtgttttttgtgaattgttgcaagcgttgaataattactatttataacacagtctcgctagttaaatcccaatgtcaagtgtaaaaggttggaaagttgcctgttgatgatcatctcctcaaacggtctaccgtgaacggccatgtttagcgaagtacacgatatagaccacgcgctcggccatttccatttgttgactcgttcccggagatatcttcgaaatgtgaaactcagtgtatcttagccaagccgttttgcctcttgcctcgtggttggaaccagtattgttctacattcttgtgacggtcccgattgactctcgcattcttccgctgtagagctctaaacagcaatggggatgtatgggatgcttcagggctcagcgtcgtcttaaatgactttgcatagaaccatagtggttgccattttcaaactctttcatattcaacttgtttcccctacgccttccccgcgggtctgaagcatttagactcatagtatatactttacttgacagtcaccttcattattcacttgacccaagatcagatatattatgtcagctgctaccatgtcaacgcgaaatgactcggtgggtaaagtggctacactttgggcaggttcagggcaagcttcgaattccacctcgtcagtcgaagtaagtctgccttcttcattaaaagccgacaacagcatttggaactgattctaactcacataattacataggagaatgtcgcctatcggtttgttctcgaccataaggttcaaacaatatcgagcaatggcatccccgaggatggattggtatcaggcctcttgtttgtacccagtctagagccgcatgatccgtgctatgacattactgcttcgtccgtgccgtcaaatgtgacccgatatgaagatgtgtctgacttcggatactccctcgttggccttgctccatgggtaactgccgaatgttcgctatcgttcctctcagccgcccaaaaggttggcacgcacgctatgatctttttccagccgtcagataacgagaccggcataccacctgactcgaacgactctcgctgggcaaccagtgacggagataaatggcgaatggacaacgattacccagtgtacgccattcctggcccagctggaactacattgatcaatgatctctcgtggtattcaaataagacacccgaagacaagagagacaactctaccgaaaattttgcgctacagacgaagacaaaccgattgtttgctaggattgagactggtaggtcacaaaaatgcgttactttcgaatctatactcacatatcgcaggcgaagaaacacaaggggcgtcgacgagcgtttggagtttcgtacttgcaattgcaggaacagttcttatactcagtatcctcctgatcattatctatcgatttgtcctgcgtaagagacgcgctcagctgcagagacgtgttaatgcaggtcaagtcgacatcgaggccttggcattgaaccaaatgacggctcctcaagaggtggttaacaaaatgccacgttatacatacttggagatcatccctccaacagaagcaacgctgccacaagataatacatcggccaatccaatcgagcatggctctggagacaagatcaactcgctatggctcaaggaaaacaaccatgcccaggacgatgctggcctccagaaacccgaagcagcgatgataaagcctaaacagaacgatacttgcagaagcaagtaccgtctgagccatactcaaacgacttgtgctatttgtctcgacgattttgttgttgggtcatctacggtccgcgaactgccttgcggacacatattcgactcagcgtgtatcgatccattcctgacccagaactgctgcctttgtcccttatgcaagaagagcgttttgccagcaggatcatactatatctctgtgacgaatgaaatggtcgaacgagagcatctttcgagacgcccttgaatgcagcacgggagactgcttttgcgtgcttttagattatgccagcatggagagagcgaggattactagttgcatttactaagcgaggcgatttgacgatcttgatgtttttgtatgatgttttgatagtgattgtatcaaatcaaacaatttaaacaaaattatccaattatggaattacaagatcagtcgccacttacccggtctctgtccttgaagatggtgcttctagtatgcctgttttaatcctggtcataagaaggcctcttcctattttatccttttactttcattcaatattgctcagaccattcatcactaggacatgtaattaccaaattagaataattttcagcctgaggcaggcagatgatgctgacacctgattttcaaggcaaagaggaagctcacactgtgattggccctggtgggtcaactcgctaatcgctagcgtcccacacacaacctctgcctccagaccttttcttcctcgaacttttgcgacaacgacaaccgacgacatcgtacagccgacaaggtacgttagcatttttttttcaatacaatctccgccgcaagtgcacttctctgacttataaccgtccagatgggtgccctcaagtacgtggaagaaatccagaagaagaagcagtccgatgtgattcgcttcctgctgcgcgtccgatgctgggaggtgagataaatcccttcgcccccgattgcctaacatctccgccgagcactggtgtgcgttgccttaggatatgccgtttttatgtggtattgctaggcggctcgaacaaagtcattcggcggaaatgattgtggcacgcaagaaaaccctttcgggcttcatgtgtcttgctatacactcgttgaacattgctgagagtgcataatatagctccgccagctgaacgccatccaccgtgcctcgcgcccttcgcgccccgacaaggcccgtcgtctcggttacaaggccaagcagggttacgttatctaccgtgcccgtgtccgccgcggtggccgcaaacgccctgtctccaagggtgccacttacggtacgaatttttcctgtcgagagcagatttcctagagatctgagggaattgaaggaatttttttagctaatgtgcgattatgtgaacaggcaagcccaccaaccacggtgtcaaccagctcaagtaccagcgtgctctcaagtccaccgctgaggagcgtgttggccgccgcgctgctaacttgcgcgtcctgaactcctactggatcaaccaggactccacctacaagtactacgaggttatccttgtcgatccccagcacaaggccatccgccgtgatgcccgcatcaactggatctgtaaccccgttcacaaggtaagtttggctcgaaatttgactgtgttgcccgcgagctttgctgatctggtccccctttctagcaccgtgagtcccgtggccttaccgccaccggcaagaagtcccgtggtatcaacaagggtcaccgctacaacaacaccaaggctggtcgccgccacacctggaagcgccagaacacccagagctactggcgttaccgttaagtgcggtagtgcactttcccagtggtttcggttggaaaatattggttacggcatgtggtcatttattcaaacacttctttcccagacagtgttttccacgctgggctcaactttaatgcagaccagtcggttctgttgttagccaaaaagccatcttgttctatgtttcaattcccttattaacgaagtatgactggttcagctcaatggtactggcattgtagaaagtgtagtcttgaattagtgctactttttactagttctatgtatgcatgtatgcatatcactgattttcaactcccagtgtcacatttgcgggtggtgtactccgctggacttgcggtggccagtcgccgttagatcgaacctcagtggatcgctagaaagtagtctagtgcacataatacatattcagactttatacgctaaggctgtctttgattgttattgtgtaacgatcatcgatgtgcgttctaactagttaacgtaatccactaccgagctggccacaccaccgagctggccaccccacccaaaacgcgtccatgaattagcacttaatgaattcaaccacccaccatgccactaattcgctctcaaagctctcgaaattcaatagagcaagaaggcaggatcttattagctatccaggctattaagaaccgagaaattagttctattcgggaagcagcacgcatcttcgcagtactgagatcgacccttaccacgcgcctccggggcgtacaaaaccgcgcgatttctcggcctaactcacataaattgacagaaatcgaagaggaatcgcttacaaaatggataatatctatagattctcgcggatcagcccctcggccctctactgttcgagaaatggcgaatcttttactcgaattgcgcggaataaccccggttcttttagtcggcgagaattaggttacaaagtttgtaaaaaggtatcccgaactctcaagccgattctcaagacgctataactacgaatgtgtaaagtgcgaagacccgaaaactattggggagtggttttatctcgttcaaaaaactatcctttaatatggtatcgatcccgacgatatttataactttaataagactggttttgcaataggattaactgtaaccgcgagggttattacgagggctgaatattacggttgccgatcgcttttacaacctagaaatcgcgagtgggtgactgtaattgagtatataaatactttgggatagacgctccctctgtatatgatttttaaaggcaaagtctttattaaatcttggtttaacggcctccctgatgattggcgatttgaagttagtctaaacggatagacctctgatgaaattggacttcgatagcttgaaaagctctttattccgtcgacttctttatagacgaaggggaggtattaacttctaatacttaacggccatggaagtcatttaaccccgaagttcgacgaaatttgtgaaaaaaataacattattccaatctgtatacctccgcacttatcttaccttttacagccacttgatatcggttattttgcggtattaaaacgcttgtacagttggatggttgaaacgaaaatacggagtgggataaattatatcgataaacttgatttcctcgaagcttacccgtccgcccgaatcgaggccttcaaagaagatactattaaaaatagcttcggagcagctggtttagtgccttttgaacctgatcgagtgattttaaagcttaatattcgccttcgaactccgacccccctttcgagctaagagagcgagtgggagccaaaaacgccttcgaactataaacaattgctaaagcaagcttcctcaattaaagcattgcttcgtacgaggtctcgaagccctccgagcccgcttaattctgcgataaaccaggttttaaaagcctgtcaagttacaatgcaatcggctgcttttctcgagaaagaagtaagcgatttacgggctgcaaacgagaagcagaagcaaaagcgcactcgatctagaaagcagataccttctaccgagggcctctcggttttagaagcatcgatattaattgtgcagccagaggaagcaattgaaccacctccccctcctcagctaagaaggccttcgccacctttattaccccgaacgagagtgttaaataggtgcggagcatgtggaaatctcgggcataaaagaaatgcatgtccagatagacctagatagatagttttattaatttatggcgttttggttgagatatattgatttaaaattcagaggttggttttggtggccagctcggtggtgtggccagctcggtagtggattacgttatttagactttcccatcaccatttccccatctgatacatcccaacgaggccaatttcatcgtgagttttatttctatctttacacgcttctaatagctaacatctacacttggactaggcactctctgcgtggaccctacaagcaaagtcaagactctcatctatttaccctcatctaccaccaagatgccatccagtgacgcacttcgtatatacccccccttctgcattccaacacaaattgttatctatggctgactttaactggaacagaaccgcctcttacgcccgctgagcgggcaattgtcaaatcctacggcggtagtggattacgttagttacgaaattagacccgtagcccgaactttcaggtctctaatctaaaaataggcctttaatgccttaggcatggaccacttccccccccggcctctttcccaatccgtctacagactatgaactgctgtaacgatccatcactctataatagagtccgaggtaagatagtcatttgctcggtgagacttgattagattactgaaggtccatttctgcaatagaccaacctgtcatttatcaaacaaagaagcaaagctcgctttactcgactgccttacccccactccgtcctcccgtcctccacgtatgtgtttggtacgaaggacaagctccacgagctggattacatactggagaggtcgaatttgatcaaatcaaatcacatcaaattgatgcgcctctatgccgtcccggcctgaacgtcatctgcctatccctccgatctcaagtgctggcaacgccgccatccctggaatacacccttcccaattttctggactggaaatcaatccacgccgtatggctcgacctcgcgatgcttcgatcatgcccccattaaacggcggtacccccaagagttcgtaccaccgaggacattcacgctcgatcagcaatccgttcgctgggtttgggcgaaaacgggacaagacagtcgccaagtatgcgacttgggactctgacgatgatgacgacgatgaggtaacatatcccttggagccagagtcgtcaagtccccggaaaggtgcagcacctggaaatgatctcgccgagggcaagtgtcagacttgtgatgctaccgtccggtggccacggcacttgaaggtgtttagatgtaccgactgcttgatgatcacagacctcgagccgatttctcatgattcaaaagacaaacccccacaagggtctcagggtggagcgtccaatttggcaagcaaaggtaacacctccagatgctagttttgcgtcatatatttgtaaaagatactgatttgctacctagtgtttcctttgacggccaatcaaattcgtggtatggtcggggggtgtctcaacatgtatttcgatagccttttggacaatagccctcggtcatggttgtcgccggacgacgacagaaagaacaaaccgctacctaatcttccgccaatgcaggatcatgcctctggtccaaaaaatctctcgcccccacgcactggcgattctcggagtcgtagtgcttcccattctagtgaacgggaaaggttggcggcgtcaaaagaaaactcaggttacttgacaccaccatctgttcgctgggagggcaatgacacgcctgtcagagtccgagcaaattcagatctccgatcaactccaaagctagacagccgcacgcaagacgtttcgcaagccgggaacccggagtttcaaagctgcgacaatcggacacacattttcaaacggctggaaaataccatcgccactgccttcaaaggctgtgactgcctcaacgaatctttcactacatatccaccacctcggtcagcccgagcagctagtaatggtaatccaccgaaaacgaagatggaaccgaccacaatgccccaaccagcgcaagacgctccagtttttgaaccagatgccaaaactcttcttttaggagatttgactgagaactcctcttggtggatgaatgaatgggctgagaccgaaggccaaaatcccgcatattccaaagagaagaacaccccaaagtctcggatgatatcatcgcgaagtcctcggatcaactggtccgagttagcccagtggtaccattcgatcctgtccgcgggaaattcttggaatgagctctgggccgccaaaaagcctgaccccacaagatcagaagcggatctgatccgagccaagagatgggcgtctattgatccgtccttgatcggaagacaagtcagcgagtctcgtttgcacttacaacgggcactcttgaaagctaccgagggcctcctcaaacgcccgcgccgtgttctgaagaaaccagaagataccaggttcttgttcatattgttagcgaatcctatgttgtcttcacctgcgtcttattatcagaatacatccatctcgccgtctcatcgagatgagaggcgcccatcgcatccaaaagactacctgaaatcggcaacccgagacggaaaacccttgcagaaagagccgcacaaagcccctgctcgtctagatggctccagtcaccattatggaattatcaaacgaatcctgggactcgcgtctaatttgcccaatgactgccatcactacatcgtgtcttgggcttcccgtttctctgttagacatttcgagcgactggtagaacttatcggtggatttctcacttaccgtttgagtcgccagcatgggcgaaaacgccctcaaaatcctcaaaacggagatgatctaataccgagctttgccagtgcttcgggaaatactgctgcggaactccacgctgcgattaatcgaagtagcccgaacaagaagcctggcaaaaagaccgaagaccccataatatacgccgaggactggcagatcagagcagcagcaagagtaatgtcgctgttcttcacggctaacatctcctctgcaacgaggaagtctgatggaactccgcgcagtcttgaagttcccaagaacccaggccctcgtcaaggacatatgattccaatcagtgcattctacaatacactgctggactattcggatttagtggcggacttcgagacttgggaggctaaagtctcgaagttttcgttctgtcagtatccgttcctccttagcatctgggccaaaattcatatcatggagcatgatgcgcgtcgtcaaatggaagtgaaagcacgcgatgcatttttcgacagcgtcctcaaccacacggcggttagtcagtacctggtgttgaaggtacggcgtgagtgtttgattgaagacagcctgaagggagtgagtgaaattgttggtactggccaagaagaaatcaaaaagggtctccggatcgaattttcgggcgaagaaggcattgatgctggcggcctgcggaaggaatggtttctgctgcttgttcgagaggtctttgacccgcttcatggtcagcgttttccgatcttagagtgaaatgactcgctaattcaaaataggcctcttcatctacgatgacgattcgcagtattgctacttcaatccttattgctttgagtcatccgaacaattcttcttggttggggttcttctaggtctcgccatctacaactccaccatccttgatgttagtctcccgccgtttgcgtttaagaaattgctgtcgtcagcggggcatgccaacgggccacaactggctacttccttgcgttcgaccttcaaatgcaccctagaagatcttgccgagtaccggccagctctcgccaaaggactccggggtctgctagaattcgaaggcaatgtcgcggagacattctgctacgatttcgttgcccaggtcgatcgctacggcgagattatcagtgtgccactctgtgcaaatggcgagaaccgaccggtgaccaactccaacaagcgtgagtttgtggatttgtatgtccaatatctgctagacacagccgtggctcgacagttcgaacctttcaaacgcggtttcttcacggtctgcggcggcaatgcactatcactattccgaccagaagagatcgaaatgctagtccgcggctcagatgaaccactcgatgtcaattctctccgggcggtggccacctacgacaactggtcacacccacgaccagaatcagtccctgtagtgcgctggttctgggacttcttggagaaatcagaccctcaagcacagcgcaagatcttgtcattcattactggtagcgatcggatccctgccatgggggctacaagccttattatccggcttgcttgtcttggggatgactgtcctcgttacccgattgcgcgtacatgtttcaacacgctgggcctttaccgctaccccacacgggggaagttccagcggctgctctgggatgcagttgtaaatagcgaaggatttggcttgaaatgatttgtttattcctgctcgggacttgtgttactattggtgtttgagaatttgtatagacgctggacgttgatttcgaagtgagctttgcatgttcatactttgcgtcgtgtttgctttctttcttttgctcttcattccgccatggagtaccggtgctgttatttcttgccttgcaaactgcacatgaggttttgtgtcttgtttttattgattcagtcttggtgactgagagagtctcgttctaatttgcattcctggacgttgttttcattctagcacacttgacatagattgatagatccctcacctcaccttcaagcgaactcccgagccttccatgtcaggaaagaacaactcaaatttccccatcaccacaccaacctcatacctttgatttaagtgatccgtaagcatcgatgatcacttcttgtatctaaatttagaaagtccaagaccatgctctttcttagagtttgtgtagaacaatgaaggaatggtttaatcaatggcctatatcgagcgttctctataaatttttcttatataccgtccaaatcatatactaattaccaaaatgcgagataacagaggcagctaacggtacaaaataccatcaaccatctcaccaatcgccaaacaactcgtcaagccagggctttcaattcccaacaaattgacaaaaccaggaagaccctcttcttcctggataataaagtcctggaaccccttaccctcattgacagcaccgttcctccctaacttagggcgaataccacagtaatccaacgcaatagcactaacgtcgacaccaggcatataagccttgatctccggcagcgcttgctccaaacgcgcagcactcggcaccaaatcatcaggactatccacccactcaacatccggcccaaagcgaatgcgtccagccatgtcaagagtcaggtgcgtacccagtccaccagtaccgggcaaagtcaccggatataccaaaaccgaagtcctaggcctggaagccgcatacgaaaagtacgtgcccttggcataatgcggaacgaaatggcgctcctttgggaggagcatgttactgatatcgcacgcgccatggccagcactattaaccaacgtctcggcggtaaaagaagtaaccgagccatcctcatccgagacagcggtaatcttatacccgccgcggccgccgtcgatagcctccacacctgtcacgcgtgtcttgaacgcaacatcgcctccgcggtcctcaaagtcgccatgcaggtaagtcatcagagagtgactgtccacaatgccagatgtctcactctcgacgatgcctgcgtctgccttgacgtctggttcgcgctgctgcgcttcgtcacgtcccactagccgcgttggtgcgtcgcctagtccttgtgcgtgcgcgtgcaatttcagacaggcttcccactgagtagggttttgcgccacgatccatttctttgtgttgcgatgggggatattgttctgtgcgcagaggtcgtagaggaggttgcggccgcggatgcagagctgagttttgagggaggtcgctgggtaatagaggcctgcgtgaattacctagttggcgaggggttgctgttagtttgtttgggttgtgttggtttattggaaactgttcaggtgggctcattgtggagattgcatacctcggagttgcgactgctcgtctctgtccctggtgcgtcatgtcgctctagtagaatggttgaggtgccttcgcgagctgcaagttgccgtgcggccgcgaggccgacgacgcctgcgccaattacctttcaatcagattagccttgtgtctgtcttggatctacctaggttgcactataccgcatgggtgaagtccgcattggtgggtcgggtgctggaaaagcagcgagtggggagcttatttataagcttaaattgctgcttaagcagggcacgtgcagacatatcgggagggcgcaattgaccagcagcctgcaaggaaggagccctgaagtgtgactttggtaggaacatccgacctccgacctcgggaatgacctcgggaatgacatcgggcgtgatcccgaggcccatatattggaactcaaaagtatgcgaccctggaactataggaatatcaaaccatagattctcatctttcatcatttgacatctaagaagaagaaaggcaagtccgaatgaaaatgaccgctagtttctgactatacatagacaaagggggcaaagggaaaccccttatgaaagaagagtgaagacaattgtttcagtttctaacaaagactcgacatgaactggagttactatttaactgaccataaatcccatcaattaacctgaccatatcatagtgagcacatctcgagtcatctcaagctcatctaaatccacacttctcacctgaacgaagatgatccaaccaggtatgttctcccgccccgatggctccaacatcgcagagatcgacacgaaggagtttgtccactgggtgacggtagacttcagcaaatttggcggacgaactaggcccaatagcggcgagagcatgatgcgtctgatggctgagcagtgcagatctggagtagccactattacatccgtgcctcagcatcatattcggccatgctgtctctcattgcccgtcgtcggaaatgccgagctcgtacatgttcatattctgtggcgtgcagctgagcttgctgattggcattgggaggagattatggccggtaaggagacgcttgatactaagcgcgttctaggcgatgctccacggttgtctcgtaaaagggtgaatggggcttaatattacctcgatagatgtagtttatttcgaccgatcgatcatagggctatattctgacagaagataatgctgtcaattgagttgtttatcatcaactcaaattcattaataagtgatggtatgataccatatagaatttaaagaagaatgttttatcttcaattcgcataatgctgtgaggtagccacatgcttattcgacgtccatgagaacatcactcattatgtataaaatatacgagaactttttgacgctccacttcccagagtccttgagaagagatgcataatcaagcaggattcgacgcgcaaactgatacccaccgtggaacggcagtcctcgcaagtagatagtagccccgttgcgaatgaagttaacagcgggatcatccgtcggcgcgagagcctgacttcccctaggctccatgaaactagtgaatccctccgttcccactgatctccagtcgacatcatccatcaactccacagacccgacactagacggcgaactagtagaggccggaaccatgaacgtatacagaccgagcactaatccagccgagaagagcgaaaacatagattggaaggtgggatggtcagaagctttgcggtttgtcatgactttgtagatttgtgcagcgtgcaaacacgcgcgtctggcggcaggtgtctgcgaccattcacggatatcgtcaagcgccttacgggcaggatttgggcctgcacggccagctgcaaggtcgaatatttggatatcggcggtgagagtcatgcaaatgttgtgccacgtaatgagagcgttaggattgaggcgatcgagggtttcgctgtagtttgtgatgagctgggattggagggaggggaggcacctggctcggccgtccatggcgtaggtgtgacatggagcaaaggggtagctggctctattggagaggaggcggtggtaggcttctgactggcggagctgaactattgctagtattgcttgtatacagaagtcatctgcgggagcttctagggtggggatgttgatgttttcggatggggcgaggatcgttgatgagagaatgcgctttccgccacggattaggtgtttccattggatggaggagctggcgctgaagagagcttcgctgcaggggaggatgagttggattgagtctgggactgtgattggacccgttgagaggaacgaggagtaccaagagtctaggagcagtaatccaatgattattcttgggaagactattagtgatgtgcgatataagtaggaattttggcatacctcttagttgattcgaccttgctccaggctttccatctcatttcattatcaggaaccgtttcgaacaaagtcatgtcaagaatctgtccttcagtggctgaaaacagaccatgtctttgggcgacctgcataattgtcattagagtcacatcgatagaggaaaacaagaaggttctcttccaactcacagacatgacattgatataaagaggttgacactgttctagatgtactttttcctgcaggatgacaatgattagtacctcgagttcagcaaacttgggctaaggaattcataccccggtcaagccagctaggtttaataagagcaaaactgtcgcaaacaatgtcacggtgccagaagcgctctcaagtcccattgagcatcgggcaaattcagctgttaccttttccaaagtgccctaatgactgtcagtaagctacctgcatatatgacgcgattaacaatagttgacctactgagaaatttctggacacaaacgcagttgttcctttcgtgccaagtaatgtcatgccaaccagcgtcataacatatagtagagatggtcgcaccttatttgccgaaaaggttggtagatggacaaatggcaagaggggattaaagatacggaaaaataaatctagtgccatatccaaaatctcagcaggagggaaatcagagtaattcaatgtcgagacaggcgtggctggaggaatattcctatctgggggtgactgcatatgcgcagaaagagtcatcggtccaaaagccgcataaaggcgccgtctgcaattctcgtcgaatccataccgggatccttcaacagcacttgcctcattgggagggtgtaatgactgaacggagaaaatattatcaaccggcgacatgacgatatcccgccataaactgttaataagacgcccggtattcggtggtgctagccagcactgctgaactctagcgaagcgttcattaggaatgctatcgctgctgtcgactgaatgtcgattctgctggcctgaagtaagattcaaattgtcaccgatcagtggaaaatggctatcgcgcatcagatctagcgagtcaattgaagccgaagctgtgcgtggttcaagccacatttgtagcatgtcttttggcccagggtcgaaggccgagccagctcggtgcgacacatgatctgccgatgtgactgcattccatccaaagtactgctgctggtcatcgatcatcatcatattgagatctggctcggtgcggccatggtgggctgaaatgtcagctaggtaatctagtgatgatgggagcccagttgatgcgagatgcgcatctcgcgaagtggtagacagaggtggaatctgtgcttctgcgccgataaaaccatttcctggtcccgggatcaatgatgcatccgcaattactgatgactgtcgatttgacgcttccgatggaccggctgtcgcattggcttgattgtggcccttggcatgtcggctcaagacatcgctgtatgctcattaaatttaggtatttgaacataggattttgaatatgttacaattcacatgtgccttcaatggaatttaccttcgagagaaacgcttgtggcagacattgcattcgtatgggcgttccttagtgtctgttttgtatgttagattgctcttgcaggggttcgacgtaactgacgcgaccgctcatgcctcttataatgttcggtttttttgaacacccgcgaacagatggaacattttttcaacaccatcacggcgctctcgaaaagatgaatgattacggtacatgtaaccctcaagacttgcggaggggaaaatatattagtcagcaagtccggggttctaaccttggttgactccactgggactattccgcattgggaaagttgataccttagaaagcaggcacaaataatgcgatttatctgaaataaatatattctaacattgcaggcctatctagtctcattttcagattctgggatacctgcatttgcaacaaaggaatagagatcttcatccccatccgacggaagctgaccactgagcatgagcatccagcccaacccagactcgagttggaaatcgcgcgtctcaggctgtgtgcttaaagaccttccattattcgggattatggagtcggatccattaagtgttcgtgatcgctttctgggggggtaactagccccatcgggtccacggtccggcttagtagcacgggtacgaatctcccatttgtgctgtagccttaccagaaggtctttagcacgattggcactttgccaggatagagagaactcatcaagggccctgaagcaggtactcagatgagcgatgatattctcgttttcttcagtttggtactgggaaacggcagcgaagagaagtagtagcacggcggaggatgtaattgagactgctttaatgtttatgcggcggagggtatatctggtctcgtacaatacaaggattttggcaatggagatggcggaattaatgcacatttctcgagcgtgagtgaacccaggtcccttcggaggttgtggttgcaggtagccttttgacatccagggtcgatgactgtagatgagattctggtaatattgcatgctttggggtaaattagcttacgttgtttattagaactttgaatggtataatagaaactcactgaagtagcaacacatgtggaagataaggagaactgtgatcgttaaggtcgatctgtaaaactgaaggcaactgagctttccaactgagaagcttggcaacattatttgcattgagctgttgaagcaaggctcttggaatacctgacgttccatacctgtttcgaggccaaagttagctaaagcaactcacttgagcccaactatatgatgtcgagcgacagcggcaaacagggacggaaacctacagaaaatagccgcagggtgccataagttcacatagggagacttcctgttcactgacagcccccacacagtcaaataacccggaatcattgtcaaatgggatgggagatgcgtagggcgtccatttgcaaggttctcgatagtcgacgtcattattgggttttttgactgtaacatcctccatgttggtgtagaaaggtctaccaaggtagaatccgaccaggctggaatttcgaaaagttaatgatatccttagcgtgtacaaaagcagaatgggaactcactggtctaccatatacgcagcccaaaaaacggttcgacgcagctcggcgtctgcagcggtaacagatccacgagcaacataggaagaaaggtcgatatgcaaggcaagatcaaaagcaagccgaagggccattcctagaattgtaagctaagaaaaccaagaaatttcgacagaactgaccactgtagagccatccacgtgtatctgagcctataccgatttcatggctgctcaagatgactagtgcttggactgttgccacgcatggagagtctaattcaatttcaagcagttcttttgcacggtccccgaagaattcaccgagagactttgggaacgtcacaaaggatggatgataacgggtctcaaaagcagcgccgagagaacacctattttctaatgtcatttcacctttccatttggtcggcaaaaaaatgactcacattgcatagcagagtgcctcggaatagaacggggtctcttctttcccatcccacgcagtctttcccttttcgaacaattctcggtcgacgacgtggaacgaaggatcttgccaggcaaaatagagattaagaagatgctcctcgagagataatgggacttgtctatcatattctgcgtcatcgaaatgatcgacgatacgatgtgtctgagtgttgatagatactggagcatcggcaaggttgaaagtcgatgtcgggccatagaagcgagctcttcctccaggaccaaagcgcaatgtgcccatccgatcagaaatctcgtcgataagatcttcaatttcttccgtgctcctggaatcattgtcgaggctgggtgggctttgaatgacggcggactcaaagggctcaggtaccctatccaatggtttccctggcggctgtagtggttctacgccaatgtctccgatgtctggagatgggggcgtaatgcatgtctcaaagtccaaggtccagtcccaattggccaataaattatcagagtgatcatcagttggtggatactgttctgcaatggagatcccagtgtcaaggaccatgggcagtgtcgaaatggcgtgagggtccgaaagcattgtaaaactcgaccgagaattttgcgatgcgttgtccggtgatctcgaggtctgagcccaagtatttagatcattttctacaccaggagctgagaacggcatagaattcggtgcctcagaaggcagatcatcgcttgcagatggggagtttggattgggggatttgctgttagttcgattgtatcttgcggctgaatgaacttcagttaagccaagaacatcaaggactttagccaaagcagtgtccttttcttgtggcatgggcggggcctccaatccactttcgtggatgaagagacagagctgttcaactctgcttgatagaagctctatggcaacgcggagtgggagtcttcacatccataatcagcactattacctagccagcagccttcctttaatgaaatgacttttgatgcgtcacttactttctcttgtctacggcctggtatcgacattcgcggtgcttgttcatgcagctggagcattggggcttaccgccgtcacactttgctgacattagcttcattttgtttcccaccgaggtaattgatagtcaccttgaccttactttcccgacatgacacgcatgccatggaggcatggtgcctcctctttggggggacactgggctttggcatgtttttttctggatgccatgagactatgcgcttgcaatatcctcgtcccttagcaaatagagggcggcttaacctcgggagggatagtgcggggtaatactaaaggggaaatgtttgatccgaactatacgtcgtagcttctcgctgctatttcattggctctaccaaaagggggaccactatcgacccgtgtatttgtatttctggggcctcaagtgggggatactcgtataagtaaaggatgaatgacatcatgcatgatcgacagcctcgttggcgaacgagatgtcgtgcaaatgtcgtttctttttccggggaccaatcgctggtaaaaccggggctggctctaacctaatccggaatagaccgcctctacgggaatcataacccggtgtgggggaccccacgttttctgtaacaccccaggttttcagatgattagtaggattaccgtgtagtcctatcacataatttagatttcattgaatataaatacagatatgaaccgcacacgagtggtccatgctaagatcgtatactggcgatattgcaaccctgctcatcatgtttttccagaatgcacaagggaaatggcttcaatacagaatcactgcagcctgcggtgccggtttcctcctctttggctatgaccagggagtcttcggcgggcttctggacaatgagccgttcctcgagacctttggaaatccgggcgtgaccatccaaggtcaaattgttgcgacttatgacattggctgcataataggcactctggtgacgatgttcgctggagacaaactcggacgaagacggacaattctgatcgggtgctgcatcctgatcgtcggcgctattctccaaactgcatcctattcccttgcgcagatgattgtcggtcgtgtcgttgcgggagttggaaatggaatgaacacaattgctattcctatttggcaatcagaaactgcacgggcagagcaccgtggaaaactcatcgttgcacagttggtaacgaatattttcggcatcgtcatcacaaatgtaagctacttcgttcacagtacaagaccttggagcaatgctgatttttttccctatcgcagtggatgaactacggattcactttcattcctcactctgccgtgagctggcgattccctctgggcttccaatgtttcttcgcgcttgtcactctcgcttttgttattgtcgccccggagtcaccgcgttggctggtcatgaaacaccgtggcagcgaagcccgtgaaatcctagcacggctccttgcaaagccaattgacgaccaggaagtggtggatgagatacaaaatttggaaatagccgtgaaccatgaaaccgaagtccaacaatcgaagcctttgcaggcaatcttcaagcgcaataacaagcaacagacattgcgcaggattcttcttggagctggtactgccttttttcaacaagttggtggaacgaacgtcattgcatactatctaccagtggttctgacccgatcagttgggttggacaacagaatggccctgatcttgtcggccgttgactctatgtcgctaatgttttggggatgtattgcagccctgctcattgaccgcattggccgaaagagattgatgctcttcggtgccgctggtagcagcgtctgctttgcgcttgttgccgttggactgcggtatggtggacccgacaacaagggtatgtctgttctagccgtggtgttcatcttcgtctactacgtcttctacggcatgtcgctcttatcgatcccgtatatctatccggcagagatcaactcccagcaaatgcgcaatattggcacttcatttgcgaccactaccaactggttattcgtttatgttatcgttgttgccaccccaacagccatcgcaaacatccagtggaagtattatatgctttttgccatattcaacttctgtttcctgccaatcatctggcacttctatgttgagaccgccaacctgtctcttgagcagattgacagactctttgagattaaacatgaggctgggaaagcaattagctggtcggaggcaaccatgacagcccgtacagaggtcatttccgatttggcacacaccgaaaaggaaaatcttgatgctgagcactatgagattgcggcttgatcttggaataggtttctttagatgttgtacatgtgtataaatgatgaacagctgtcgggtatctcgaatataattatttataagctttgcggggtaacggctaatccataactcattcccgagggcttttctctgtgaagccgcttgaaaagtctacgtagcaaattcatcttcaaagcagtttgctaatttgagctacttctcaatgagattcttttcttgcgaccagggggcgtcttcgtagaaagaattccactagaccaaaaaaccatgatctctatttatggcctaaaggagggctataattgttctgtttcttgtcaatatgcctatcttgacattggcgtttctgaggtaaccaaaaaagtttagtgacacgataatgcaattgcagtaatagtctcggttatagcaagtcccagttcaactcggattccctttcccggccaagccttgtatccactccaaactacgattgtgtatataaccccgactaagctgttgtcgaagcgactactggaaagcatttctcagattcttcaactcttactactccttcaaatatcccctcgtctcaagatgtcagccccgaagttgcgcgtcggtatcgccggcctcggccgaatgggtaagcattgttccccaatcggatttcgaaaacctccaattgacacataacaggccaacgacatgcattgaactaccacgtttttactcctcgtgccgaggtggtagcagccagctctcctgatctcaatgagcacgtatgggcaaaagaaaacctcacaggagcaaaaatctatacagactactatgaaatgctcgagaaagagaatttggatgctgtagtggttgctggaattactgccgtccacgcagatcacgccattgccgctatcaagaagggattgcatgtcatgtgcgagaagcctttgtctcttgacgtcaagattgtaggtcgttctatataagctccctatatgaagacatatgctaaccgcaacaggctcaatccgttctcgatgcctacaacacatcgctcaagacacaccccaaccagaaagtcatgtgcggtttctcgcgccgctttgatgcttcctaccgtgaagcctatgagagaatgacctcaggccaatacggccgaccagtgatcttcagatcccagactgcagatatgctcgacacaaccgggatgttcgtgcagtacgccaagaccagcggtggaatcttcctcgactgctccatccacgatattgacctgatgttgtggttccttggtgagaccacccatctcaaaagtctgcaagcggttggagtcattgccgtccacactgcattggatgcgagcaaggaccgtgacaatgcggtagctacggtcgagtttgacggtggcaaaattgccacccttttctgttcgcgtatgatggctgctggacaggaagataccaccgaggtcatttgtgagaagggctcattgagagtgaacatgcaaggccggaagaaccaccttgagatccacgatggtcagggagctagacgtgatcttcccaagcattactatgagcgtttcagagaggccttcctcacggaagctaatgagttcactgctagctgcttggataacacgcctcctccagtgtccctctcaagctcggtgaaggcagttgttattggcgcggctttgcagaagagcttggttaccggtgaaaagattttttttgaatctgggaaagaggctagactttagtgtaggaagaagctgtccaaaattcaaataggtattcattcaatagacaagtgcttttccgattctgtacattctggacttgtttgtttgtatatgtctcacttcgcgtcacacatgccaccactacattatctacacacgtacatactgatgccagctctgttttttgtgtgatatttgctcgtctatataccatgtgccaaacttgcttgatatcagtcaatttatggagctccatattctgattcttaagcggagatttgtgtacaataacatacaaacaagacagtcaccgtacagatctcatgaacttatagaccattaattcacttagaagtgccaaagtattgatcaagtctagagatactataagatcaaagggtagatatagtcatggctaataaataatcctatatgttgaacgatagcatcaaaataatacccccccaggtggctgtggccctgtggcgtgcacggggcaccgttatctggggggggggggggggggggggnnnnnnnnnnnnnnnnnnnnnnnnnnnnnnnnnnnnnnnnnnnnnnnnnnnnnnnnnnnnnnncgtgggggggggggggggggggggggggggggggggggggggggaaggatgcagcgtcaagctgccccaacgtctgagccataaaatgctcgtcggtcgaccctccctctcatcaaattggaggttgactttcttttccatctaagacctccccgacaagagggcaatgaatctttctttcttcttccacccatggaattctacttctttttttttcaaattccaaacccatggaagctttgatggcagactaatctgccagcgtgattgcaatgatatctctcttcaacacttattcttcttctgccttcttctatagtgtgctcgctgcctcacggggatttttctttgcatctttcccccgtccacctgtgccgtgagcagacaatctccagtatatcagattcagacaaaggtacggaccctaagcctaatatgtcatcttattagttgactacagcctacgattgaattaagattaatttacttcgacgaaacgagcttctatactccggaacaacgggaaatcaatgttcaagtggtaaatgagaccaatgaagtgatctcgacattgattcagtctgaattcgaccaactgattgatgaaatcgaggttgctgaagaagtcgacatacttgatggaacgcatgacgaccaaatggaagaccaattgatgcccgaggcagaagcaacagcccgaggcagaagcaacagaaacagacgaaatccttggcgatcagccagcaacatcagacgaaagcgaaccagacgaaatcctcggtaaccaggccattacgccgtcagaaaccattgacgatcaaccacgtgacgacggtctcatggtattcattgacaattccaacgtcaatggagatgattacatctctctctaaaacgaccattctcacccaatgatgacgacgaagaatcacctgacaagaaacatcggacgaaccttattctcacctatttacgcgccttttcaacggcatgactctctcaaccaaagaagacaccggttgatagtttgccaaaagaaccagacaactggtcagaagcgcaattccatgcccataaagctgaatggcaccatgcaatgcaggttgaatatgacaagctgaatgagatgaatgcttggatgtctgagaaactgatcaaatgagattggcatttagaccaatgttggaccaatgtggaaaaataccccagaatgcctgccctaggcatcaaattcttccaatccgatgggtattcaaatacaaatcagacgaaaacggctttttgacacgtttcgaagcacgcatttgcgttcgtggcaaccttcagatcattgaagacaaagaagaggttagggctgttggagtgtggcagaactaggcacgatgcttcgtaatgcactctcgatgggtcaaatgcgtagtgtttaaacagataaacagctaggcggtctagtgtcaggtcaaagatgagatcaaagtgtatgttctgggatgaaatagtcaatttgtctaactaatattcaatacaatttgggctttcttataggagtcaaacattccagatagctcagcaatttaaagatcagataattcatgactctcttcagatgtaacaaagcaagacgggatggaacaaaggaagcaatcaatggcatcactaaaacaaggaacacatatattctgacacaccccttcagattttgaccttagtcaaaagctgtacacatgggataaaataagaaaggagagagaagggatcaaacattgtcgaattcggttacccgattaggcaattgtctcaaattcagttggttcaagaattcaaggtatttttgagacgaaaggtgttttgtcaatccgtcggcgatcatattgtttatggcaatccattggagatatatatctccatttcttaccttttcacgcagccagtgcttagttattgatgtgcacgtgatgtaatttcgtctgatatgacgaatttgacttcgttatcagatcaatggtctgtttattatcatatgataagatcagatcgtgttcagtgtcaaactcaatggaatggagcaatcgtttcatccaaagtaggtattttgctgcttcagagagtgcaactaattctgcttcggttgtcgatgtggtaactaacaatccgttgttttctcgctgaccaatcaattggaccactaaaaagggtgaaaatgaagccttgagagctttttcgtccgatgttatcagcacagcttgcatctgaagctgctcggaacacacattgaggatcacatgatccgtcgaattcaattgaatggtatctggtcccatacaggtatgagattgtttgctctgcagcgatcacgtgggcccttctttctggcttagtcaaccattgagaaagcattgatgtgcaaaggcaatgtcgggacgtgggttgatctcgcgggctataggttgatttagggtatttcaagcgataaggaatagcttgaagcaagaagcctgcttctgttttctgtttcctcaccacagaaaatggcgctgaaactcaaatgaaggggcttcctgccaagagctcagtctctccactggagcactctctttatgtgacgacccagggaccggatggttcggtgtctcactggaagtcccatcgacctttcgagttgtaggagatattggaaccgaaccatggagcctgtcattctgtgaacgctttttcttctccgaacccaccatttcaggctcagtgcaagctttctgccacctccggataccgtgagaagtatcaagagggaattgcgaccaagtatcaatcccccccttctcaagtctgggaaatggcacatacgtgccagcagcgtggcctcggctgctctctcggggaggaatcgcagccgatagctgctcatcagagacatgcggaagcaaattcaaaagaatgctctcagtgagctggagtcgattctccagtgcttcggtataccctttctctggtcctcttcgaagctgttcgggccagttgcacggtcggttgttctcaagacattgttcgcaaacgggtttgaggccgctgcacttttgctttctcgagcgacacgagttgcaagcagttgtgatacgtgctggtcttttctcttttgattttgatgccatcttattttcttcttgtggcaggtcaagaggtatgaggggagtggggtacacgcagcggtaaacggcagaccccatcgcctgaaagttctaccgaacgtcccggtttgtcgctacagcggccatccggcgaaaaggcaggatgaactatcagccacctttaatcgccgtgttttatatatagtctggacatccatctgcattcaatttactcattacatcttccccagttccatgcatatttcctctttcaatatggcaccaaagaattcataccgcattgcctctatcccaggcgatggcattggtctcgaggtagtcagtgctacaatccaggtcgtcgagaaactcgcaaagatccttggcacattcaagatcgactttgagcatatcccgtggggaaccgagtactacaagcaaaccggacgatatgtgtctgaagattaccttgacaccatacgccagtacgatgcggtattattcggtgccgttggatcacccggtatgttttctatattgcatagcatcatgccgactaccaagcaaaaatattaacacaaacagacgtgcccgatcacatctcgctctggggcctactcctggccctccgcggcccactccagctatacgccaacgtacgaccagttcgaactttccctggaaccaaatgccctctcaacaccgcaaccgaaggcatcgactggatgctcgtacgggaaaactccgaaggcgagtatgccgggcaaggcggacggtctcacgtcggacagcaatgggaagtcgcgacggaagtggcaatattcacgcgcgtgggaatcgagcgaattatgcgattcgcatttgagacagcgcagtcgcggccgcgtaagcttctgaccgttgtcacaaaaagcaactcgatgcgcaacgggatggttctgtgggatgaaattgcggaattggttgcgaaggacttccccgatgtgacctgggataagatgcttgttgatgcgatgactgttcgtatggtggcgaagccgcagtcaatcgatacgattgtcgggacgaacttgcatatggatattttgtctgatcttgctgctgcattggcgggatctatcggtgttgcgccttccagtaacttggatcctacacgcaagaatccgtcgatttttgagcctgtccatggtagtgcttttgatattactgggaaaggggttgcgaatcccgttgctaccttttggtcggcggcggagatgcttgtctggattggtgagaaggatgctgctgcccagctgatgggttgtgtggagcgtgtctgtgctgcagggattctgactcctgatctggggggaacatctaacactcaagggattgtggatgctgtttgcctggagattgagaagttgtgaaagaagatctgagacaattcattgtctttccttcgttcttttcttcttatctttgtttctcaatgtcttcgtctcaggtcatctgaaatatgactttggatgaactaatcagtcggccctgcattgaatatcgatagacacaaaataccaaatgatgaatacagaaactgatttataggacaccttaagtagtgagcaacgcgtcttccagaattgtccagaaatatcagttatctgtcaaatatgtatgaatatcataaagaaaatgtcaaaggcatctcacacaagacggaacagatcagcaggcgatgaactaagaaatccggaaatgtcattatagcaatatgacactgttttcctcatataaaaggaatggtaacaatatcagtatgctgttgtcttaagagtccaacatttaaacgggcttcagcacccttcatagtccttcagaaagcactcagacgggccttcaaacaagccaaagccccccgaatccatctatctcattgatcatcaaaagcaagatttgtcccctccaactacaaacctaccaaccaactaataatatccaagggatgttctaccaaaacggaagattaatccaagagctcgaatacaatccccgaagaacgaactgggtgaacatattcttcaatgcccgcgactacagatgcgatgaccttgccataatgcgcacagtcgtcacttgcatccgcacaagagtcgtcagcatcactggccatgctatgcaccacgatatcccactctgcatctcgatccaagttcccggggaacatggtgacaaggagtcgattcttgctactgcagagctattggcggaatatcttcggggacaggttgctaggggctctgttaatattaatcggtctttgctctttcgcaggaggtagtgtttggtctttgggaaaagggaattttgatgcttgaagtggttagagcttgtttggaccggctatttgatagaatgggaagttggatcatcctgaattgtccactatgttgtcaagtatctatactgtagtaattcagctggtaacttgtataggtagtcccggggtcatgcatgcacacgagccttgatatctatatctatagtcaggttaaagcactaaacggtttgggattcagagacattatgcatgatgttaagtggcataccaaagacataaaaatacagacgcacaaagatatcggggaatagatgaaaggcttgaaaatgacattgtatcatgactcctttgttcttgcctagatagactcctgactataaacaataaagaaaagagctactaggcagagaaagtatttaaacacaacaggaagggactcgaaacctccttcttatctttcctcccttccctcttaccacttcacagcaaataaccacaaggtaagcaccccccaaatccaaaacatggccatcctcaattctaacctcacaaagatgcagagcatgttctacttcgacggggagctaatcccagagcccgagtacgatccacgccaggtcagcaactgggtgaacgtcttcatcaaggcgcgggattccaactccgacgacgagactctaatgcgcaccgtcgtcgcctatatccgaacaagcaccgcttcgatttccgtccatgccaagcatcatgactacccactgtgcgtctctatcaaggtgcccggagactaccattccaacaaggcgtctattctcgccgcggcggagctgcaggctgactactattgccaggagattcggaatgggagagtgcgcatcaaccgggctttgcttttccggcgtggggtacaagaccggcgccggggttgatggtgcagatggctggtttatggcccgaatgagaggctatcaatacatgagcgtttgagagaaatacccacagcgtaaacaatatgcattattttggttggtcttctttgatatcattgtagattattttctgttttttctgagttgtgggtgatagcatggtcttagaagcttgggaattgctgtccgatcatatcgaacagagtgtcaaagttagcgccctcgattaaatccaccatgttcaagtcgaaattagatgaccccttgagctgtgccggatctgtgtcctgtaaatccatttgcgttgaagaggatgtatcggtgaggatgccctgctcgttcatttgtgacgggtacattgacgtcgaaggaactactgtaggatcatgtcctctgtgcatggattccacccatgtgttattccgtgactcaagctcggacgcccctgcgaataagccaggctcttcatgcaagtgcgacagacgaccaagtctctgtctgttctcctcccgtgcggttgaatattccacatgtgtgggacttccctcggagcctctcatcacatatgcttgtgattttgctgttttatcggatccgctttctgactgttggatttttgcagccagcactgaaagcgacatgtggcagtgtttggctgtctcccattgagtagacatcaaacgcaagaatcccgaaaattcatcaatttccctatcaagcagttagtacacacacgtagtgatcagttcgaaacctagcagaggaaaaagaaacaccccacgtactgaagaccctttgtcaacacatattggttcagttggcaagctaaagccaacactaacccagacatccacgcagccgacaaaaaaccaggccagaataaagcctggtggctatcaacttgcaacctcagccccgaaaggatagcccgggcagccccgatgcaggtttgcaatccagaacagaattcggcagttgacggatctagggacagcgaaggtcgatggataatcagaatgagatgctgatacagcacagtgaaaaaaggagcaaaatcaaacgcactgtctggcaatacagacctcaccacttgttcagataccactggcttgatttggagattggtgggaaggcaattccaccacttatgcacgtctgtcacgaggaacaacaccgagctgcgacgaacagatcgaaccaatattgatttgtggaagagctccaatgcccgacccgtcagggtccccgagtcaacgtagctagcaagaacactttccttgctgtagtcttctttattgccgtgctgcggcgcagagctaccattcgcagagtggccccggggggaatgcaattctcgggcggcaggcagacatacatcgatatcggaatcttgtataccaagcggcaagcccaaagcctggctcaggtatctatctatcgcataagcacaccaaaagacccgcttccgcaattgtcggtcgtgggtggagagttgcttgtatcgaaatggacaccggtggagacccgcatgaagcatcgagcgtaggatacagcctccgacagtcgatgctggtcgaagtgacatggtcgcaacgagatatacttggatagctagaagcgcttgcagggatacgatatcatgtcgagatgagagagtcccaagcaaagagttgaaactggccggtgattggatcttcgattctgactgtagatctaagtcgggcgctagaaaaatgcctagattgaagacacattggaaaatgattgtccagcacgtactccgatggtctgcacagggttcctgcgtgtgctgagcttgattcccattggagtaaacgttctccattgcctgcaggaaggtaggaccatgcagaaacgggaacagtgggtgccagactttgaaatacatcatcatcaggcccctagccacatctgggggtggtagattccccagagatgccgtcaatgatcggtcgtaggtccattttggggaagattcgatcacccgcaaggacgaagcagtgtctctgacatatgaagtgcgctggcgcttgtcacgaggtgagccttcggcgcctacgagcgtttcctctgctgtggggagattggattcaggtgaccccgggccatctaagccgttgaatgcacgttttactgtcttgatgaaatagacgccgcttgagctaccgacgaactggctatcctcattcgagtgtgccgtcaaagaaccaatttcagatgtctcgggtacaaattccgatgccattgtgcatataccatctcgtgagtatgagatgttctctttaaagctcgatgtgtttcgacagaatcatcacggtcccggagtgatggagacatgctgagtcatcgtacgagacggacaataactagcggtctcgggaaataaagaaaacatccgtctacggtcgaaaggaacttggtgaagcaaaataagtcactgccatcccattgattgtctggcgctgctctccggaatccgataacaagggagaccaggcttttccgtgaggaatttaaatctatctgacagaacacaggcggtagggagaagtgcggaaagatgataacctcacaaatcctccggaaaaagggaaaaagaaaaaaaaaaaaaaaaaaaaacaaaaaagaccttggtgaagcaaaataagtcactgccatcccattgattgtctggcgctgctctccggaatccgataacaagggagaccaggcttttccgtgaggaatttaaatctatctgacagaacacaggcggtagggagaagtgcggaaagatgataacctcacaaatcctccggaaaaagggaaaaaaaaaaaaaaaaaaaaaaaaaacataaacgacgacggcgaaaaggttgactgtcaaaggaaccacacccagcgcctagaataaaagacttttaccaatgccaaccaggagacaactcgatatagcccagtccaagtggaaggtaagggaaatagcgcatactagggaaaccggagaagagagaagaaaaaaatccgaatgtcataccgcattcactaaacaccaggaaggtgactgcctaagaacaaacttttcgaaccgagggatatcaggatcagagatggggagatgtaggggtagaaagggtaaaagatgggaacaaataatgataagagaaatgaaaagtcgtcaaaaacgtgcgtccaagatttccgagaagacaaagagtgaacacatcaattaagacttgttctcctcaacaggggcctccttggcggcttcctggggcttgggttcggtggtctcgccatcacccttgttcttcatgtactcatcatagacgttaagggcctcatcgaccttgccgcggagagcctcctcatcatcgagcctggaagaatgttagtaaatcttgtcacacataactcaaaaaaatgggcagtgtaacttacaggccaagcaactcagcgttatccatctcaagaagcataccagtgatcttgccagcaagctcgggctgctgagcctggatcttggggtaaagagcctcgccgagcatctgcttctgctgagcggggggagcggtgagaagagcctggttggcagaggcgggctcgccaccagcgggctgaccaccaggggcgggctggccgcgaccaccaccacgacccatctgaggaccaccacggccgaaaccggggccaccacgcatgttcatgggcataccgggaacaccacggccaccgccgccacgtccgaaagcctggggcatagggtagcccatgccgttaggaatgccaccaggggcctgcatgcccataggcataccctggaagttgggaggaagctgttggttggggggcataccacgaccaccttgggggaagggaccggggtactggggacgtccagcgggcatgttaggcatgggcataccgccctggggggcgaatggcataccaccacgctgtccagggggcatgaagccctgctggccagcaccgtagaagacggcgggctgcatgaactagtcaagttagtaattgagcgggctgaacaggaaagttgcaacttacaggctggggcataccggcagcggctgcggcctgctgctggcggatagtgttgcgagcctggatgctagcctcgagctggctgcggcggacatccttgcgctgagcgagagcaacgtagaggggcttggcgttgaccatacgctggttcatctcggtgacagccttggaagcctcatcggggctgctgaagcagacgaaaccgaagcccttgctcttaccgaaggccttcttctctgtcttcttctcctcggtgtcctcgccctcctcctcggtcttcttctcctcggtaggctcctcagtcttcgcctcggtgctctcctcggtcttcacctccttctcctcggagtccttggtctccttgtcggcctccttctcctcggcctcgggggagggagaacgttcggcggcatcacgcataaccttggcggaagtgatagtaccgtaaggagtgaagaggtcacggagcttctcatcatcaatgtcgtcggtcaagttcttaacgtagaggttgacaccctggtacttggaggccttctccatgcgggcagcctcgtactgcttgcgcagctcctcctcacgctcgtgcttcttctgggcacggccaacgtaaagcttctgagtcttgacgtccttctcgttcatctcagccacagcggcctcggcgctctcgtggttggcgtagttaacaaagccgaaaccgcggctcttgccatcctggtcgtggctgagggtggcggaggtgatctcaccaaaggcctcgaacatgacgcggaactcgtcgtcggtaatctcgagatcgatgttcttgatgtagatgttggtgaagttggccttcatctcctcgaacttgctttggcggtccttcttggagatgtggtgtccgacgaagaccttcttgtcattcagcagcataccgttaacgtgcttgatggcgttgttggcggcttcggcggtctcgtagtggacgaaaccgtagcccttggagttggcgaactcatcctgggcgaccttgcagctgagaatgttgccgaaggcagcgaaggtgtcgtggagagccttgttgtcaatggcgttgtcaaggttcttgatgaacacgttgccctggccagtcttgcgcagagcggggtcacgctgggaccacatgatgcggcaaggctttcccttgatgagagtgtagttcagatcctcaagagcacgctcgccgtcagcggtgttgttgtagttgacgtaggcgtagcccaaggaccggcgggtgacggcatcacggcagacacggatagaggcgacctggccgatggaagagaatagctcgtagagcatagcctcagtcacggaggggtcaagctcgccgacgtagagggaagccgagtggggctggttgttggcagcatcaccggcggcctcggaagtggcctcgacgggggcgccattggcctcaggggtagcggcgacaacgttgtcagtgacaggagcggtggcgggggcttcagcagacatgatggcggctgttttcactaagaaaaggaaaaagttttagcatgtgcatgccgagcctatcgcagagagggggagggggaatcaaggaggcatatgagataaggttacacggcagttgatgcagtctatttagcaagcaaccaaggggcaatgagaaaaaaacgagggggtgaatcaatgaaaagggaggggcgccatacagcgaagtatccacgaaacaaagagttcagagaaatttcacttgagcagagagcactagtagcggattagcgggggaggagattcgaagtgtattgcatgcgcgatcgaaagagaagaagcagagatgacacggttttcaaccgagtaaaagagtggacaagaaccaaagtgactaaccaggtgaaaatgaagacgatggaggcgttgaaagaaaatcttccacacaacacaccgcacaatcaggaatgagataagataactggaaaaagtctttttctgggtttttcgtgtttttttgagattttgtatctttcgatttaaggattcgaaaagaaaaggaagacttttccctaaagaaagagagagcaacagagatggagggggaggttgtaagaaggaaagaaaaaaagttgagccgttcaaaagcaattggttctggaaaactcagaggctgcacgagatggggacactagtcctgtttgggaaaaggttgccgctttaagggcttattaagtataacctcggatggatattgcaagataaaagaaagaatatggccatgctatgcatgcaaaaattaatcatagacacgcggtctacccaggaaatgtacaggaaataatgactgaacaccccccttcaactcagatcaaacccagctcccgaattcacagcatataaaagcttgctcttcaatgtctctgcatcagagtaccgtggcagtttgagaagattcacacacgtactggtactcggcaatctttcctggtcctcactggagtctctaatgctaaagttgggacgaaggtggctgaatcccaacaacggagctcgaggggtagacgtcacgaaccggatgaccctttgtcgctcctcgttggtcaactcatgcataacctgccagaacagtgcaatggtcgggtgttctagatggtcatcaccaatcacatacacacctccgtagagggtattccgtcgcaagtcctccacatcaatatcagctttgtctccgctcactaaagtttgcaactcggattgattgaacatggatagccaggcgggttgaatgatctggcccagaccttgcaaaaaggcgtttgtctgtagagcaggttgcaactgtagacgataacgagccacgtaggaaatgtagaccaatctatttttgttcgtcacagcggtctgtgagccatttggtttcagttctgcggtgacagtgcggttgcctccactgggcatccgaattatactgttaatggtgaagtcgagaccgaagtcttccacgtttccgggataattcttcagttgtaactggtgaaacagattggtcagctgcaggttcaaaaaacacaatcccgaccttgccagacgataccacttaccaagccttggtataacccctcatcaaggtccttcagatcgttcaagttggcacgataggaagattccttcactgcagacctagagcctcctgtcaaggcccacttcaagagaaagaatggggcaaaattgacatcgaccaagatcccctcgtaaagacactttccaataatccggccgaggaattcatatcgtcgaagaagaccgcgcacgtcatcctgccattctgggcttgaacttgtgagcccagcctcgccgagaactgttttgagttgggcaaccgctgtcgggctgggatacagcagatggtgatcattttccgcaaacatgctttcgtggtcatcagttttgaaagcttgggtagtgatactggttaggaactccttcgtcacaccgccaccatcgatgccggcttccattgctccaaactggtcgataaaactgatctggattggctctttgagaccgtcacccaagccatagtattgagagaatgcatcttcaaatacactctcacgccggatgtcagcatggtgtcgagccaagatatccgccgcaccctcaggaggtccatttatcatagcgttttgggccacagacaaacgccaggactcagcatccacgaagcctttccggcgacgctgttgatccctaaatatgaattgacggaagatctgcactctcgtggcaaatggtatgaagaaaggcatatttcgaagtatttctagccgtggcgcaatggcggctagagcattattatgagcttgtcttctttggctatttcgcatggcttggagatgaattagtcgtcgcgcatggctattgccgacaaggtgaggagactctgggtattcctcatcaagaagatcaggctcagaatcttcatcttcgtcctggaattcatggcgtttctcctcttctgccacaacagctggaataaagccttccatgtcgaatcgatctgtcatcaaccaatgattttgtggaaggaatttgcgtcgagaactagaagcgtgtcagctagtgtgactaaatcatagcaaatggaacgtttcaactcactctcgctcatgtagcattctgagcaaacctgtaaccaagcctttgaagtagtcaagtgggatacctgtcacaccaggaagatcattgatttccttcttggcctccacctcagaacgctctatcgtcccagaaacctgagccgtgttgttgaaataacttctaagatccacagcggatgatggaacgggccctttcttggtcaagtcggcaacattccagtagagggtgaaggcgaggtttttgagaaagacggtcatatccttaatgtctttaagtggcagtgcgctctctttcgtccacgaagacaagacatttggtgaagctgtaaacggtgacgcgcttgagaagaactcttcgtcatccatgactttcaagaggaacgtgtaaagctcaaaaaagagcagaataatcgtccactcctgttcttgatcctctctatccccatcttgaggcagttgcagtaatggaagaacttgggtcgagtccttgctgattatgtcaaagatccggctggattttgatgcctgccagaaatatttgatcgccggtattttcacacctggctggccagaagtgggacctgccgaaggcgccgagcccaggtacaaccacattcgaatgtcgtctccacggcgagggaacaccctcagcaaattcagggcataggtagcaagaatcttggcttctctcgaagcgttgggttcgttgtttggtaagtctgtgtaagaaagttgggacttttcgatgcgagaaagtagccccgtaatgctactttggttgaccaagctactgacttgatctccgatgaactgatccaaataaggacccctgattggatccgagccgttctcgtccgcctccaagcaccgtgtcagatagatagatgttgagttgagcaacccagagaccacattcaggaattcgagatcaggtgtttgcaagttggcctgccctggaagagcatatcggtgaaagaaaatcaagtacgcaagcagccaaaggcgactctcgataccctcgacatcgtcggcagaaaggcgttctttggtcaaagaaatacatgattcgattgcaggtgccagtaatttgtagttgatttgatgcgccagtccattaagctcaccgagataagtgggcaggttcggaatagtgagatacgacatagcaagagcttcatatgctgtcatcgtttctggggttattggtctcagaagagccaggacagcattcgtgacatgctcgggtgacagggtaccttccaagatcttaatgttctttgtcaagaaggccatcgtttgatagtattgtttggcaattgttgccatcctccttggtatcaagtcaatgaggaagactatcgtccgaaggaggggcaggactgctgcttcatgagtcgggctgtcttttgctgagccgagggcatagagaatagcgactgccagccgtttcaacagctcggtccagtcattttccgtagcgatcgtggggagagcatggaaggtctgctcaaagacattgcagaagtatactagacgtagaacatcttccttcttccttaccaatcccacaaactgaaccagaagcctgagctggtctaagcattgcttcgctgtgggatatggcggtgcggaaagacgttctagacactccagacgctcaagctccgtcgttgggccccggtcatcgtcgaatcccagggcactaataaccctttcccactcaaaattatcccattcggacttccagcccttatatgttgctttcctgctctgatgaccccgccaaactcgctgaacggtgcgagatgcggtctgtcgatctctctcatgttgtctcagggctcgctctcgctgggcaatggcgactgcgctctcggggttcacagcatgaggggtatgtctagtcggcgagtttccggggaatgcggcgaagggattagtggctcggccactgaggttcacttgccgtgggcgacgagagttgcccgtgaaggattgaaacatggttgcagcaggagctgcctgatgggaggatggccagcaggctagataaaacgaaccctctaaacgcagagaagcaaatcaactcaagcccgcatcaccgtgagggaaagacgaaaggtgaagaactatgacatcgccgtcgccgggtgccgatacgggagagcatggcgggcttatcggacttgtcgagcacagaccacatctccatgagacctgagcactatgtacatattgccactggaacattctggttttaagctgacataggtcagagtgaaccatataagacatacgaaaaatcctttgtagagaaaaacaaacaatgtcaaaagaggcgaaagattacttgaagtttaacctgatattcatagaatttgtcaaaatactacacaattgctcctgtctcggtgccaaatggtacacgtccaccgatgcatcgggctcctccgtggtccaaatcaagttgatgttgtagagactataatacatgggatatattcaatcaaccagcggagagaaggttgatcaatgaaattgttgaatgatgcccggaggtggttgttgtggatggtatgccgggccgctggcataaaaattagagcactctcaagcgtctagattgctgcgcactcacatcatttgaaaacacgtagaaaatccccgctatgcggtttcagtcttttggaatttctagaaaagggtcttcgagggattgggcttggcagtctcgggcgtttgggccaggttttggtcttcaatctgcttagtctgcttaggctgcggcgttggcttggtttcaagcttcacagtcttttcgatgtggggttgtgctagtcgggcctcttcggcttcaacggtctcagcccacttctccaggtagtccttgccctcaaatcctctgatcacagtaatctttcggccatttctctcgatatcttggacgtagttcgacggtgtcttgcgcatgtgttttgtgatgaagggggcgagctatcgccatgttagcagatccaacatttcagtcaactagtaccaaatggttctcaatgctcaccatgaatggctctttcgcagtctcggcgtaatgtgccctgccaggaatttcaagcttttccgcaggcatataaacacggtgctttgtcatatcgggcctgtatgtgcctctcttgtcaaaatgacccatagagccggtccggtttcccttgtagtagccgccattgacctgcttcgtagtcaagcgcaaacgcaccatcattggctgcgtgggcttgaacattatggcgacagttctatggccttgaagttggaacagaagggggatagagcgagtcgagttgtcccggaggaagatgggagacaaaactcgacgaatgaacgggtcgcgctaatctccgcgccgagaactttttttcccggcagaaaaaaagttcaacaccatctacacccctcttgaaagctgaaaacagccatcagatcatttagtactattttagtactgatctgaagcttctttcttagtcgtgaattcgatttcttaactcatacgccagtatgcctcgcagccagactcagaagcagggtccgaaagaccgctcgacgcagaaatcagcaccgaagcggaaaagcactcggtcgctaaatgcactgtctattgcagagaaaacaattcacactagattgggtgttaaacgcagtcgtcttggagcctacgatgatggtaccttcaaccgcaggagaaacaccggtggcgatgacgacgacaacgacgaggaggataccgccgcccaatacaaacgccgcagaaccgaggacaccggaagccttgacggtggcagtgacagtgaaggacacgaatggactctcggacaagtaaatagcgataacgacagcgaattggacagcgacgaagctctcggtgagagcgacgaagagcgattcgagggcttcactttccgcgcatccaagtctaaatctcacccgaaaaaagcgccacccaagccaaagaagcctacggagatcaacttgtctgaagatgtcgacgagtcggatgaggaatctgacggtgacgactacgacgaggacgatgatctgggagaagacgccgttgaccttgctacagcctgggatatgaatgcagcggccgaggaggaggaagcccaggaagcagctgcgaaatccaagcgggctgcgaagtatgatagcgacgaggattccgggtcagagggggacagtgaaagcgatgacagtgacgatgggctttctatctcggacgacgatgcagatgtggatccgcacggactttcaaaattacaagactttgtccagtccatggagaccgagaaacctacgaaacgtacccaaaaatcacaggaacagggcaagccctcggaatacggcttgacgaccgccaacaaattgactgtcgccgatctactgccctcaatcacagactctcgcctcaagaactcgctcaaacatatcgactctgttgtccaggcgtcaaaatcgggcattccgggcaagctagatgctcctctagcgaaacgccaacaggaccgacttgaccgagctgctgcctatgagaagagcaaggagactttgaaccgatggctcgaaaccgtcaaagccaaccgcagagccgaacatctttctttcccgctacgtgatcctgatgctgagcagactcaccgcttagaagctgccaagccccagacagacctcgaaaacgtcatccagaacatccttgtggagagtgggctggctgaggctgaaggcaaatcagctgaggaccagattcagagtttcgaggaattacaggcccgcaatcttcctattgaggagatccaggctcggcgcgcagaactccgcaagcgacgtgacctgcttttccgagaggaagtacgcgccaagcgcatcaagaagatcaagagcaagtcttatcgccgtgttcaccggaaagagcgcgaaaagatagagcaacaagagcacaatgcactcttggaagccggcgtagatatggacgacatggaccaggagaagaacgagcgtatgagagccgaggctcgtatgggctccaagcatcgtgaaagcaaatgggccaagggtttgaaacagacgggtcgcactgcctgggacgaagaggcccgcaacagtgcagccgacttggcccaaagagaagaggagctacggaagagaatcgaaggtaagcgtgtttctaatggagacgatgactacttgggctcttcaagctccgagtcagaagatgaggacccttggaacgaggaggcttccgatgtggaaagacagaagatccaaaagaagctcaaggccctcgagggcagtgatgatgctggtgatggcatgaaggggcgccatgccgaccttttcgaaatgaaattcatgaaaaatgccgatgccgcccgcaaagaacagaatgatgcggagcttcgccaactcaatcgtgaactccgcggagaggagtctgcgtctgaggcagagtctgaggtcggtcgacgaaagttcggtcaatcaaagaagaccgaccccaaacctcgcgcaaagcagttgcccaagaatgagtttgaggagaagctagattcagatgatgaagctgcacaggccgcaggagcagacgacgatgttgacattgttatgaacggcaccaccaagcacaagtcaggagcttctggcaacaagaaggtttcacaatcctcacgacactctcccgatcggcaaaaggatacgccagtagaggaggagaacccttggctgattcagaccgaacggaccaaccgtcgccgaaccggcccagatgcccaagagagcattgacatttcacttgatgctacccagcccgaagttattccagtggagcaacagagcaagaagcaaaagaaaaccaaggcagccctcgcgaaacaacaattcgatgagaatgacagcgatgatgaggagaaggtgcccgtcttgcttaagaaccacgacctcgtgaagagagcttttgccggcgatgaagttgtccaggagttcgaacaagacaagatggacaccattaaagatgaaggtgaccaggtggtggacaatacacttctgggctggggcagctgggccggcgaaggcgtcagcaagagacaacaaaggaagcagaagcgagacctgactactgtggccggtgtgaagcctcagcagcgcaaggatgccaagcttgatcgggtcattatcaaccagaagcgagtccagaaggtaagccaagttgtcttcctatacgaagacggacaactcactgactttttactctagaacaagaagtacatggcaagccaattgccgcatgagttcgagaccaagcagcaatacgaacggtccctgcggctgcctttaggccccgaatggtctacgaaagaaaccttccagagtggcaccaagcctcgtgtcatgatcaagcagggcatcatcaagcccatgtcaaagccgatgcaatgaatgtaaatatctcacttcacatatgccatgtccaatgttagcacctaatgcgacccatcttgcggcgccttttgaatcaaaagcatttctattcttgctgtactccattccacgtgcccaagtgcacattatagttatatagttcgaatggttcgtacttcatatcatttcacaacaatgtttccactaggcctagtgtcctgactcaggatagtaactattttatatctggacaatgtaggtggcatacgtgcctctctcgaccttgggattgtcaacttaagaccttggataaaccattagaacatgtcccatgattctataagaagtaactaaaaagccatccaaggattgtctggtgattcatattgagtcatccctgagttcttaacaatttgaatctgaatatattcatgctttttcttccttttcaatcctgtcgctctactccacatgggcgatcccttggcaagtgctgcctggagttgacatcttcaaatatttgactattcacgtctatctcccaggtatccccaattatctggtaacagtactatatacataatccagtaagtggatggtcgttgcagtgaatcccgcacacattcttgggggtggggaacgcacgcggactcgacgtgttgcctgttgcgccctacattgctgagccagacatgatacccaactcatgtcattccccttggctgaaatatgtactgtacagtactaacatctgtgaagatcgacagtctgtggaatctgtctgcagaccattcacaacaaaccagcccgtgtgttgtcccaatttgggtgtttgagctccgagggggtttgattctgttggaatttatagcacatacttgtaagattgcctctctttgaatttatttgtctccttttcaagcttcacttgccttttggacccctccgaaggcgtctaccctcaagtgattcatatccgatttggatcgaattgaggaatagcacaaaggcttcatacttcctacaggctccgcgtgtttaatgccggtgacgagatctggctttgcatcatggactcacgcttgaaatggaaggctacagccgtgctgacttggcttttagctacagaaaaagcctactgtctcccacacgtgggaaatgaggtagaagctactctgcaaaacacagctaccgaacctgcacgtgcctttgagactcagtatccaccttcaaacagtgaagacaggctgcttattcccgagtcccaccctgtacgtctcagagaaatgtgctgcatagtatatggtatggtattgacattttggactaggtgtatcgagtagctttggaacaggacggtcattcatcgcagcagccttttccacagtttgacattatccgatttgttgacggcttggaagatttgttgggctcaggtggtaatactcctgcaccaacactgactgcgacaggacagtctactggtacaggaaaatcgcatcctattcaagctacgacttcagcaaaacagcctgaaaacccagcgccaattcatacagctggatctgtgacctactcaccgcaggctgggccaagtactactgtggcacatggtatgattgaccatgaattatagcaacttcaaattctaatgcttagtagagcccgttcacatactttcttcatcctcggttacatcaaaaaccatgcctagccaagatatcttccagccggttgcgactggtcctgtccctgctaatatcaagtcccgagatgatcaccctgtgcagaaccagcacgtaagattatcccaaatgtgagcacgaatcaaacattctaatgttgtggtataggccaatactaccaaccctattgcgacgaataagttctacgcaggccttttcttgggctctcagaccaatgctaccttcactcaaccctactctctggcatggtccaagggaggtggctccctgaagagttggggtatggctgtctcccatgtccagcctcatatgcttgcatacggaccaccgaacagcaagatccccggaaacccagtacaatactacatcaacccaatcggccttcaatctctgatcttctctgcaaccgagcttaaccagtcttccatcatgaacgtcaatcagccaaaggctttctcggcccacgctgtgatcaagccctctgaaggctcggctaagcagattgtcttccccgttgtgcaaggcatgggctacgcaacagctgtgtacagtgatctgcagccggtgattgaaagtggcgttttcttccgtaaggtcgtcagcgctggttcgcctaggtccggcatcttcaagtaccaggtttacctcgaggatgacatgacctggcttctctatgccactccggctgatggcaaggatccggagttcaagctagtctcaaattcccgtcttcgcgggccccagggcttttctggtactattcaagttgccaagaaccccgcgggcaagtctggcgagaaattctatgataactcgtctggtgtatacccagtggcaggaaaaatctctggttctgtcacagatgatgtaggcacctacacgctctcttggaagaaggccggaaaggatgtcaccggcactcctctgatcatgttcgccctaccccatcacgtccaatccttcgatggtgccaccaagagccgtatcactgatatcaaccttcgcaccacaacaaagggcaactccactgcagtcattggagaaagctggactatggtcgaacaaagcctccccattgatattggattcgctccgtggtcaaccacccagggcagttctaacgagctctcagcctcagctcagcatgccattctccaggctgctccccaggagctcaagcagaacatttcaggccagacggaccttaacagcatgtactacagcggcaaggcgttgagcaagttcgcaacgctagtgtatactgtcaaccagcttggcaacagttctgatctagcaacagatgccttccaaaagctaaagaagtctttcgatctattcgtgcaaaacaagcagcaatacccgctcgcctacgattccgtctggaagggcgttgtctcgaccgccggctacaatggcgacctcaaccaggatttcggaaacaccgcatacaacgatcaccatttccactacggctacttcatccaagctgccgccatcattggctctcttgatcccagctggctagccgcgaacaaggagtgggtcaacatgcttgttcgtgatgctggtaactctgttccaaatgatccttacttcccattctcgcgctcgtttgattggtataacggtcactcatgggcgaagggtttgttcgagtctttcgatggcaaggatcaagaatctacctcggaagataccatgttcgcgtatgcgatcaagatgtgggggcagacgaccggcgatgctagcatggaagctcgtggcaatattatgctgagcatcctgggtcggtctctcaataattacttcctgatggaggatgacaatgtcaaccagcctgcgaacttcactgcgaacagggtaactggaattgtaagtaccaccattctctttccatgtctagcccaaactcgacattaacagaccaaaacaaacagctattcgagaataaggttgatcacaccacctatttcggtgccaacctcgaatacgtccaagggtatgtataccaccgtcccgctgttttttttcactccgaactattgctcacaagtattagtattcacatgctaccgctcatgccgcacagtcccttcacacgccgaaaggagtttgtgcgccaggagtggcaggcaatgttcgctgaaaacgcctctactccggcctccaaggttgagggcggatggaagggtgtgctctacgccaacctggccctcatcgatcccaaatcgtcgtgggacttctttgcccagtcgaatttcgactacagctggattgatggtggtgctacgcgtacttggtacctggcatttattgctggtgagtctcttgaatggagtatgatgtcttttcatactaacgaaacatattaggtctggggggtgctccttaaggtggtttaaggcttatttcttggtgatatggagttgggtaatgacttcttctctttatgcttattttttctggccttatgatttgcttttctctacttgcttcttgttttcggacggtccttactggtggctcggagttttcttcgattcttgtgctgtacttcgtatatatagaacgaataagaattatagaatatcatttctagctcgatattagcttgttcagttaatagacatctatgcgcctttatcttatttcttggtaaatatatatatccgtggatacaacctagtctcttatttctcccgttattaagattcctctacaaccataaagttatacttcacatagaacattttggcccttggtggtatacatgacctattatcggttcagtagtccatccatagttcccatcgccataccatgtccaggaaccgtcagaatatatcgcaaatatactaacacagtaaactacctgaatctatgccccagcaacagggagctctaaatccactacccaaggcgcattcctcgcctcatacgcgaccgtcataatactcccattaacaaaaagcgtctcctccccaacccgcagcggccgatccgccccagcactaacatcacagaacgctccgcgattctctaacatctcctccatatccgtcgccacatcttcaagtctaacaccaccatctccatctccacccgccttatcatcccacactccgcgctgtgcaccccacccttcatggatatgaccgaagagatgcagtcgtggccttgcgcgccgcgccgcgcggaggagatgctcacatccaacgctcaaatcaggagggacctgatccaggaccccggcgggcgggccgtgggttagtaggatgtcgatggccgggtaatccgggattggattttgaggctgtgggagtgcggcgggggcggggttgtagcggtcttggtcgcgagggtatgcgaaggcccagttgtagaattctggttggtagggggaagcgtaaagagtgaattttgcgcctgttgatagggtgaaggagtggattccttcttcgaggtagattattcctgcgtttcgggcagattcgcttgtccagagggcttttatagagcgggcgtaggttttgagagaatccgtgtttggggttttggctgaggaagtgcgtagggtggtttggaggttgtcgtctgatagcaggatggattcttcgcctagttgctccgggcgttgatggcgggtgtagccgaaggttgtgaagtattcttcgtccagagttatatcgtggttgcctgctattacgagcttgagctcggcgtcggcgtcgatgagcatggcgatcattgcttcgtgctcgacgcggtaccccacctttgtgaggtcgccggcgtggaggaggatgtttgctttcgggagtggatagcggtaggcataatcggttctttgaggtgggtgtggtgtgcttgtatgagtgtctgatatcatacagatgcgagtcttgatggtcgccatgttggttgattgagggaaggttgggctgtgggggagatatggataagcatcaagctcgggccctagtagcgcccagagcctccaagtacccggctgtccaacacccctactgggaactgctcattgataagttctataaaagatacattggaacatgctcttctgcataagtctttctacgaattgtattacttgtatactacgcaattaagaatgcaataatcacctaaagaagagatgaaactaggaaataattcccatggatttgacggctcagagctctacagacaaattgcatcctgtggatgctctgatcatgacatagctgaaactccgatccacccgttgcaacaaccgaatattttattttttcgtttacttgcggatagccttctggtagaaagcaagctcctcaccctccaaaatgtaaccgtcgcagcggccggactggccggggcgcgaggcaacaacggcgaacagacgaccggactcgaactggcgctcgatagcagactcggtcttaccggagtcagcgaagcgggcagcctgcttcttggcgacggaggcggacttcttctcctcctcagtagcatcagccttctgctggcgtctacggccgatgggctggccgtagtgggcctcgtaccactgacggaagggggcagcgtcaatctggacaacggccgacttggtcagggtgtttgtgcggaccagctcgttgttggaggggtggaaggacactccaatgatacgggtcttgcgggagacaccctcggagccccacgagaagttaccagactcgagacggagaccacggaacttctggttgccaccacgggtgcggacaaggtggatgcgcttggtgccaatacgggtgttggcgggctgacgacccttctcgaaagctctgtaggacaaagataggtaagaatctgcaagtggtatatcgaatccttcccctctcctttcaaatgaaagaaacgttcgacatcatgctggattgattgaatcgtacctcttcttgcggtagaaagcgcgcttggcaccggtggcgctgcgcttgtggcgagaatcccgagaaatacccatgtttgcgattgatggaggggtctaagtcgacagacacaagttagatattgttgattgtggaccttcaacaagttttctttttttctttctttcaatccttctgtttcgtcgcgagcgccgtgcaagatcaatcttcgaatatggaacagttgggcgacagtgacggtggagtggttggatgaccgttgaaagcgagacagaatcgaaagttgatgttgagggaattgaataccgatgatcgaaattgatgggcgcagcgagcgaaacagaatttgtcgaaagaaaacttgcaggagttgagatagcccggtaactcacctctaaatgtgcagcccttcaccagaaacacagattagttgtcgtagggttgtcgtgggagtttgaggtcgtggagtcgctgaatttcgcagggcgcactgtgtcgctcgcttgtgtagtgccctaaccgacactaggccgcatttggattagtggccccagtcactggatcggtcaggtgataaccagatggctagtggctgactcatcgtaaagtcacgtgctggtcactacattatcatgatctggtcgtacacgatctggacattcgagccatttacattacaacgatgtacaacattgaaccccaattgcgtctatttgcagttatactcacaactctgaaatcaatacaaatacaaatgatcggctttcccagctagtaattgcacctatcaccattgactacctatgctaccctctactggctcttgccgttcttcttcgccttctgctccttcacaaacttcttaatgcgcgagaacgaaccgtaaccctcaacaaaacacgacgcaacccacttccaccacaaacccgacataacaggcacattcaggggctttagttgagtcacaactagcaacacggtctcaatgatatgaatagccacgacatacggctggagaatgcagacgaggcgcggaaaccagggcacacgctggagacccaaatactcgtagaattccgagccaggctgcagattgctgcgttgaaagcaggtgatgtagaacagaaaacacagcacaaagatcacagcctggatgccgcgcggggcacggtactcagtgagtgtgatctcgctgcggcccagacgctttaggctctccttgtgcatagcaaccattcggccgcgtgcctccgagtagtccttcattgccggttcgatggggacgctgtagcgggtaccgtgagcggtgatgatcaggtaggaggtgctgatttcttctaattgggcgtttttggcttgggcggatgtgataccgcagtaggcttgtaggaatagtacgagggaatcttggtggtcggcgttcatgtgcttgatgatgaagtctttggatgacatggcggcggttgtagtgggagtgtaaagtgccaattgggctggattcgaaagaattgaaacagttgcgatttgaaccgagtaccacgtatgatatatggggagttggtaacacaacgggttagtagaaataagtgccaaggcccgggcctcggcttcacagtttccgctatgcctgacactttacagaagtttacactcaccacacgcctactacaacactgctgcacttttaagaaagatgaattcaactccattcaaatgattgtccaacaaatatacatagcagtatacgctccggtatattgcatccccttggccctgcacgccaggaaaatcattgtaaaaaagaaaagaacaagatcctgaacagacaaacggaaaggtattacatcaaaacatggctctatggaaagcagcatccaatcaattgaagcattgaaaaaggatcactcgtgacgacgttggatcttcgtgataggattggcaatggaacggggatgggtggtcaagccctgttgttgatataaaacgcgatcaactcctaattcggtccttgagcagacattctttgaaggggtttggggagaggaatgcaagcctcggttattacttacatgagagctaaagtaagatctccatgaatgcgtgccttcagctcgacctcgatttccagattcagttctaatctcagcttcatgccttcctcgtccagcattgatttctcctccttatgaaggacgtccatgccaccagagggcttgaagtccgagttctcattcgagtacggctgcatggcttcctcgtcgtcggattcgtactcgtctgaatcatattcagattcgtccgtgtattcgtcatcttgttgaacgggttgttttttcttctgcagctgtttgttcttctgtgtcttggtttgtggtacttcttcatcatattcctcgtcggtgtagtcgtcggcgctgtcatagtcttcgccgtcggagaggtcctcttggacggggaacttcttgggctgctctttggttttttcaagggtagccataatggatgtgatgggactagagtatagaggatagaggtaggaagaagacggtgtcaaaaaggaaataaaaaaagataaaagcagaagagtatcttaataacattgtctatatgatgtatcattcaagacggggaaacggcgcacagacatcatatcaaagtgcggaacatgacgttggaggctttgctttccaacttctctccaacttctctccaactcgccaaatccccagcctgcactggcttctcgctaggcctgaccgtggtaaaggccgtgtccatactgaaaactgcaggataaatctccagaatctgccaagttgccaacaaaatgtgcgtatcctcgtgtccgatccgtggaaacaacgacagactcgtggcgtgaaccaatggaaaagaaaagcaactaggaacaagtaaatcacttgtcatcgggcggtttgattggctggctccatcctggcaatctataactggcaatttgccgtgaaggctttgacgtcgagtggcgtcatatcattttgcgttacgtctgtttaatctattagtgtggggaacatcaatgcaccaacttcagcgcgatctaggctgattggcgcatgaaactcgctgaccactatatttatccgatgcacactttatatacccagttgctccatatgcgctccacatcgtgatccttgtcccggaacgtcatctatgcagtacctggggagtcccagcccgatgtctggcaccgatggacccaggaaccacggcattgttcccagctgacgtcggaggcggttaggttctgtttacgtccggttttatccaagccctgtgactctgatgatataaacggctgtgaaatctacatcattgaactagacgcacgattacatagttcatttattaacgctttgtccttcattatttcgtgctcgaatcgattcatattcccctcattccccctcctgacagccttcttcttcttcttttattttcactatgtccgaccaggaacaacctcccactcctaatcccgactcaacaaacacaacccccaacaagcccaaacgtgcccctcccaagctaggcaagaagtctcctgccaagcaagaacaaacccctccatcctcggaacaggaccaggaccaggatcaggaccaggacaagcaacctaaagaagacgagcctaagcctgaagagcctgccaaacaacaagacccagagtccgagcctgagcccgagcccgagcaagaagaccagcccgaaccagaaccagaaccccaacccaagcctgaacgtcgtcgtcgcagacctcgtccccgcccacaagaatcagacaccgagtccatcgcccgcagcgaaatggaaccagagcccagacctcagcgccgtgtccgtcgccagcgccagccacaacaacaacaacaaaatgacagtccgctcggcgggcttcctggcgttggcggcgtagaccaggccggccagctcgtgcaaaacacagccggtaatgccctaaacggggtgactggcagtgcaggcaaagctgttggcggggtccttggcggcggcgaggagaagaaagacgatgatggcggtcgtgatgagcagcttcgtctgcggttagacctcaatctggatattgaggttcagctcaaggcgaagattcatggtgatttgacgattggtttgctgttagtattccctcttttttcttcttatgcacatctaaccctcccatttccccgtggctcttaacttgactccatacttctgttggtgcatttcactgactgacaatctagtaattaatcttgccgcttcacagcaagtagagaagagtacatacctcttctaaatatgcttatcctttctcatctcgatgagcattcgggccccgttccacggaggtatcgggtgtgcctacggatacattcaatgacttgtttatggtttatgttacagtgatgcacgatgcatgggttgattttcttttctttcttgttgatatttcttgtctgcagataggccatcctcctggatctggcaactatcctggtgtcttgcggtgtacaatacatttaaccttcagtcttggaaaatatctgagtcaggagaattggaataatgaactaggcttttgtgttaatatcttctaatccgatgctgtatagattgaaacaagttgcctagtaaagagaactttcggcttgcactgattgaatctcggacgggatgcagtgttcataactttttaaaaagcaggtcagtcatacttggttgaagccattagaataaaaaatatatgtgtattagaacactacactctagacaactcatctagctatctattatcatttgtgcaaagaatctactcccaacagaaaaccgggcgaagtaaaagaaattaaatacaaaaagaatcaaaacaccgacagatagagaaaagagtaggtagtataaccaaatcatatatgctctcttctcatcctttataccaagtgtatttgaacccatctaaccaaagaaaaaaaaactgtagctctttcaaagagccacgagaccattccatcctactatagcctacaaacccgcaacatacatcagtccgtatccaattgtgacaataaccacaaagcacatgagactggccgggatgccgcgggtcaggaaatggtggacttggagatatcgctggccggtctgaggtacttcagtcatgatagcagctaggagaaacaagttagcaagagagctcgatacaagtgaactgaaggaaggacatactcatattagggaatccactcgtgggcaatgccatcgcaacagagcacatcaaggcactagccatgaccaacaagttggggtgaggattttccatgctaacgccgatctggcggacaagcggtaggatgataagggcggcgacggtatgcgagatgaaggtggccatgacaaggatgagagaacagaagactaagaggacgctgtataggctgaggttctcgacacgcgcggtgatacccatggcgatggtgtgcagcaagcccgatgaagtgacggccttgcccagacacagaccaccggcggcgaggattatgatcgtccagaggaagttgttgaagtcctctttgttgaggatgccggtgccgaagaagatgacgagagggatgatggcgatgacgcccatgtcgccgaaaatgtgctcgagctggtggctggcgcaccagaggacgatcgtcaggagcgtgacgatgctgataaaggactgcatgccggtccagcggtctttgacagggcggatgggcatcacggttgagttgcggcccgggcggaatgtcaccagcagcagaacccagatgagtagaatggagatgatgcagacgggcaatgcgatgaagaaccatgtgccccagctgatgttcggctgcatgttctgcagggcaatgatattctgcggcgaggcaatcggggacgctgcaccaccgacattggcggctaacgcgatacccagcacgagtgccttggcgaagtccgactcgggaggcatgttgcgcagcaaaggctggatgatagagtagcagagcacaggggacgcaacattgctgatccacatactcaagaacatactcacaaacatgttggtcaataacatcacagatggcttcgatccagctttgcttagcacaaacatggccatgcgccgtgcgatgtcgtacttggacagcgccgctgcgattgagaaaccacccaggagtagcataatcacaggagtccacatcgccgcgaacaccttgccgactgattccttgggtcccagccgcgtgtgcggctcttcgtctgaccgcatgatgcctagagtcacgactaggaatgggataagaagcgaagtgacaaacagcggaatggcctatcactcaacgttagcattcaatgtgagtcaataaacaaacagtaacccatacctcagtggcccacaagatactaacgaggactagcatagccaagcagttctgctcctcgggagtttccatcacgttcaaggaaagcattacgccgaatatggcgatactaaatatcagcgtaccaaagctcaagctacagagccataacggaaactggaatcgaccaagcggggttgacatctcctgggtgcggatctcgttcttgtcgccctggcgccgggagctagccgggtcatcgccgcccaggagggtccggcgaataccaacattggcggcctgcgcacgtcgttcgatttcgatcatctcgcgccagacagtgttccgctcccaaacgacatgctcacgcagatgcagacgcagctcgcgcctagcagactgtttatcgttcttcgtgacgatgcccgcgtacacaccctccacgttctcaatatggcgatcgatttcagccatggtactttcagtgaaaggtggtgcgggatggacaacagtggctaggtagtctcggcgcaggctgcggtccaaggttttgtcatacttcttcagggccttggcgaagccagtcttgttcagctcgatgaaggagcgaagttcgcagagtgagacgtagcattcgatcaggcgcttttttaacgatataccggtattataaagagcgcggaaatcctcgtcgttcaagtacgactcgtgcggttctcggctggtcgccggtccaaagtaggaagagtctaccaaatcaccgtagtggtcctccgtgccagactcgccatcgatcgactgcgacactctcgggcgatgtgagacggccgccggggaacgatcgtcgtcgctatcaccaccttctccttcatcgtccgccatcgagtcattgctcacagcactagaccgccggcgcggagccgagacattgttgccgcggcgggagcttgcctttatgattgtctcgctgacggggtccatattaacaccgtccgtttcggaaagatatacaccagcgtcttttatgagctcatctgcgagttcaaaaatctccgcctccttcttctgatagaaggaacagatcttatccatctcaacgtcaagagcccttttaaagattgcatccgggttgctcggctcagcgcccagcagcggagcggactctacatctgtggtagacggtccctcaacgcgattgacctgtttctcgagggtgtagatcctagtcacgatgcaacgttagcaccatcgaaataatcatccgggccggtgcatcgatcctgtgcaatgtgacaccaattcagattcccgaatctgcatgtacacactatcccagccacagacgccctgatattcaacccaacaacttacaatttcttcaaattgctgtacgcgatgtagttcgagctccaatcgggcacagcattaaactgaatactatgcgagaacttcatcttggcttttgaatcaggatcgacgttcccgtgcgatgcgttgtgagcgcgacgtcggagagcctcagcccagaaccgaagatgaaagccctgaggctggtcgtgctctaatgtcttctcctgcgattcctcaaggatatcaaaatctgtaagggggtttgagttggcggcaaggtctaaccgcccaacgctatctcgatattggtctgagcgagcggggccagatgcggttgtggtagctgtgtgggagggagggaggtagtcgacaagttcaatggaatcggagtgcgaggtaggagccaccttcaagagagaggccggagggtagtcggcctaggtcattcaaggagtatagagagatgcaggactgaggggaaggtagcagtggcctctatcttgggtgggggcacgaagaggctcgagaagtccgggtcagttggatattggggttgcactaagtaaggcaatgatatagcgcagcactccactgatcggggaaagatcttgtatctggttggaatctattccgaggctgtagacatgtagaatattgaacatattggcggttttttttttctcaccccaggaaccgttgcgcttgagctatgttgtagattaggtaagcgtgctgcttggcagggcctatcagacaatgctctatacaaagcactgagagaggtgtgacagagaacaagatgaggttgatgtatagaagtaattgtattcaaggtgtgtaactaagtttagctgagggtaggtggtctccaataataggaaccgtaacgataaggagtataagccgccatgtctatgtatataagacaacgatatggagatatcataagcgaatctaaaactccgtagcatatgtcaaattccaacggttgatattggcttttcctcgggaaatatcatgagcccatgaagaataaaagtcaaattcttttgaccagactatataaatgtacatatgcagaagtgctcagagatacaagacaaacccccaaacccggatagaagaaatacaatccaataagaccaatttagcgacgagcgttagtattcaggttcgcacgaccagaaataccaatcttgtgctgttggtccctcttctcccagacaccgctacgaccctcagcaacggccaccacctcagccgcaacacggttcgcaaacagcgcatcacgtcgcttatccgacgcatcaagaatccacttgatcgcagtacggcggcgctggcgcagagtcagcgggtgaggaatctgcacggcagtaccaccacccgcgatacccttctgctgacggattcggaagaggggcgccacggagtcgacgacgagagtaaggtagaggacagggtcgagggggagctgagatgccgggggagccccgaggagacggcgacgggggttgatctgggggggagaggcggtgcggaggtgatccagaacgagagacatgttctaatatccagttagttgattttctcaacacaccctcgccaaccatagatgagaaaagagaaccataccttctgcgccttcgtcagtttcccactctccatcatcatcttagtgaactggtcctgcatggtatcgtagcgcttgcggaagttcaacgtcttcaattcctctgggagggcaggcggatcgaacttgagcccagggttttcctcaagagcctgaccctgcacctgctcaatcatgctggcaagagcagcagtggcctcatcactagcgccatcgagtccgggaatatgaggaataaggttagcctcgttgttaggctcaacaccctgcagatcgttcataaggcttcgagccgaagtcgagaacgagcgcgagccaccggactttttcaatgcgtcccgcataacctgcggcatgtgtttcatagcgtccttatcgcggctgaggacctgttccacgaaacacagttaacacgggcctttcggctttctcataagaccctagcaagctctcatattatgtattattgctcacctcctcaacgggcgtcccttgatccaactcgggagtagcaggaataccatcacaacgcttttccttatccataattcgggagatctcgttggcctcctcgctaacatcgggcagctggtcgacagtcgggtaagtctgctgatcgggctgtggctcgaccttctttgagccatcgcgcgaagagctccatcggcactgaatgggtagtgactgaacggcgcggaatcggacggggctggcgatgagtgcgggcgtggtggattggcgcagggccgagacggccttgttggctgtgaagaggttgagtcgaggcggcatggtttcggtcgtgagaattggccccggtgtaattattgagacgagggggtcaagattaatcggcctgttttgggaggtttgcggcgagcaaatttccggatttgcttagtaagcgccaagattttgatgtgaggtcatgaaatgtacaacaatacttgatggaaataagaacaaaagtgatggatactaattagtttaagcgatgattcaaggcaaaactaagcttcgattcgtcgattctagtctagcactaaagagaagactttttctgatgatccaagtgactatctagcgcagatatattttcgcaaagtgatgtcgatatacatctagtggttcaattttaatgttgtgtttgacctattttgagttactctctacatagacttatagagatatagtgggacatgcaattttgactactaaggtactatagacaggtactatagagaagtagttttgacaaagaatacaaagaaaacacggtagatgctatatgtagcgcatgaagaatcaactaaacaaaagagggacctggtcagagatgacaacctccacaactcgaagataaagccccaaactcaagccatagctcagttggtaacatcatcagggtagacatagaatgccaaggccagaatgatatacatgccgagacacatgccaccctcaaggtaattggactttccatcctgaataagcaagttaacaaccaatccagaaatgaagaaagccacggtctcgaaagtctggaagtgcagtgtcatctcgatatccatgatccagcccaggataaccaagaagggcgtgacaaagagcgcaatctgcaagctgctaccaatagcaactccgatcgcaagatccatcttatccttccacgcaaccacaacggcagtgacatgttccgcggcgttacccacaatcgggatcagcaccagtccaatgaacgtcttgctcatgcctgtggtctttactagggggtcgatagcatcgactaggtaatcggcgcaaatagagacgaggagagtcacaatgacgagcaccacacccgcagcccacgggctgagaatgcgctcctcctcctcgtgctcctcctcctcggcgccggcgatgttctcggtatcgctaccattcgtctcttcgaagaggtcggagtgagagcccagctggaagtagagatacatgacgtagatgatcaggaggatgatggaggtgccgtgcgataagataaggatgttcttctgcgcagcgttgtccgggtccgagttctcacctgcaccgtcgggattggcgatggagttacccgagatcgcggcgtagagggttgcgggaatgataagggatgcggacgccacagccatgagcgaggacatggtcgatgctacggtggtgttgaaagactgttcgcggtagcggagtccaccgacgaagaagcagcagcccagcacgagcaggatgttagacaggatacttcccagcatactggcctggacgacgcgaatctggttctgtctcaaggcaattacactgacctatcaagaaacaaagataaattagcatcaccacccgctagcaccggtatcaatttcaagactcgaggatcggcaagcttacaatcagctcaacagcatttccaaaagtggcattcatcaagccgccaagcgcttgacccagagtagcggccagctcctcggtagcgaagctgagtagcgaagcgaggggaacaatagcaaagaaattgagtgtaaagacagcggtggagtcccagccaagggcaccggcgatgatgcccaagggcacaaagataagcaggacgttgacatagtcgcggacgattgttttccacgtcaggtggacgacgcgcattggccattgcacccatatacggttgtcgttcgggtggtggtggtgcagtccatggtcggtatgctcgtgagatgagaggccggagaaggagccacggtgtgcgccgaggagtcccgttcgctcactggcgtccagggagccgttggtgccagaggccattcttcgtggaccgaaagtgtggcttcgaaagtgagagcggaagtttgggagagctgaatataaaattcctcgggttagtttggtgaattttgcatccgttgccagaacggaattgtataatttatgagactttcacagaaagccggaaaggagcggatggggaagaatgagaagatgggaaggggaaagggagtatatcaacccacacatgatttctacttggtaccaagcttccaaagagattaaggaatggttaattggttaatcggtgggggttcaagccgcttccaaggtttttctttcttagcgacaccgacatgaaatttccgaggaatcaaagttagcacagcctttcgactgttaggaacttgaagaacaaaaagtggggccctgagtgtttgccaaggtgggtgtggcccagtcagtggggagcggagctttgaaatgacgacccatcggccttggagctccacataccagagaatgggacgcgatgattggccacagtgcaatgccaaggttgtgcactgccacagtccacgattgggacgcacggaccgatgtgtttcggagatccatggatgctgacttggacttaatctaagtcaggggaaaaataacattatgtagattggaactatatagcacatggtatatctcttttaacaccaaaaggagaaccccagtccatatgacagaaaaaaaaaggatcaaagaagaatacaacagggtagtaagtcacatcgaagtgaaagaaaaagaaaataaaaggagcgtcaagacactggagaaaagaaaaagtcaaaaagaggtataaaggatagaatcgaataggaaaaagaaaggtgatcatcattactcctccggcagcacaccattagctttgaaatccatccgactgctcttgcggccgacacccttgagcatactgaaacgacgaaacaccgagtcccgcatcccgctattactattattgagcacaggggacaacggcgccgtgccattcgtggtcgtcagagtcatcacattactatcacgtgtggcaggccgcgaataatcgcgtgtagacgggagcgtcgaccacccaccactggaggcgggcgcaatccggtctgtggctgcaccggtggcaacagggccgcgctgctgggagtcggcgcgactgcggccgtcgtgggagcgggcagccgtgtcgtgggggacattgtgcgtgttcaatgaggtctgggattcatgggccacggacggcgaggagccgtgcttgtaggtcttgtcgccgaagaagctgcggcgtctctcgcttcggccgccgcgggagtggctggttgtgcggctgttaatcgtagccgtgtcgtcgtcgagattttcgtcttcttcacccactatttggcctttgctgtcggattgctggatggtgaagatggagttggtggcgccgtgggatcgcttgaaggggttgattatgctgatccgttgactgacggattgcctgtcggagcgcttgcgcgtgtgggcattgtttcgggctgcgcggttgaggtcttgttctgaactgccgactcgctggataggtggcattcgacgattgtcgctcgaggagggggactggcgagctgtttgtgtaggcgtaggtgatgaatactcctgcggagcagggacgagagaacctaactcgggctcgaagacatcttcaaagcgtcggagtagttcggcttgggtagcttgctgagcggggcgctggtaaagagccaatgcttgtttgatagccaaggcgtggtcgacgagtgcaacgaagagcgccgtctccattgggtccaccggctgctgtgttgcttgtactatttcaccgtcttcatcaagttcctcaagcagcttgttccttgccatctccgcatcggataggaatacccgatacgatgccacacagttagaggttgacgagctgtggtcaagcagtgattctagggcatcggtcagattagatagaccagaatcctcacccgacgcagcacggcgtccaataagctgaagctcctgtgttttgcgccacgtgcgctcaatagcagtctgcagaggcgagagcgtaacctcttcggcagaaatgacctcactacgacggaggatattcggaaatgcttccgagacagtgaagacgagcttttgaacgaagtgctcccggacatccgagctggtcgtgtgtcgtcgcgaagtggaagagaagcgagatggatccgagatcaacaggtgctcgcggacagaagacggaaccttggggcgctggtagacaggatgagacacatcgcggtatgcgctaacggcgctgatctgaaggaactggccctcatagtcaggtatctcgccagtagacatgacctgcgcagtagggtgttcccgctgcatacgatccacaaaagaggccatgcgttcagtcggacacgcttcgaatatgaactccttatcgcgtaggccgggaggaaacccaagacccttgtagaccacacggaagtaacgcgggaattgtttgttgcccttggcgatgtagtcataaattcgagccatggagctttgggctcgggagagcttggcgaagtccattgtcgtgtgctcatagtgcaccgcgagctccttatagcaagctaacgcggggccccaggccatggcattttcgaagttctggataatggagaagtataaagcctctctccgttcgaatgcattctgggctgggaatgcgggcctgagtagctccggcataggcttgatgggatcccattcgtagagatcggcatggaactgaagggcaagacctgcttcagtgaagttacctgccgcagcctgagcatccgcaagttcatgaacgtaacgaataaagatgtcctcgcgacccatgtccttcatatattccattaatttcagagcgtgcaaactttgggttgaggcaccgctctgagaagccaccaaaagatccaagagctcatcgactgtcccgaccagactcttgacagcattcgacaacagatcatcggatatagtttccctctcgaacagatccaacagctcgccgatgaaaaccttctggctgacgctctcgttcatctgcttggacttgaagagcgtatccaggctagagatgatctccgtttcaataatggagatatcttggttcagatcccattcactcagaatcatcgtctgcagtatttgaacagcaacatgtcgcagcccctcgtggacactgagacacagaccaatgatgggaggcaccaggccgggaacatactggacctgataaccgcccagccttttcagattgaatcgctccctctcgtcgtccgtagtctcccaaccaatggcttcccaggtagattgcaataagtccgcaccttgctcgcgcacatcgccggcgatcttccagacagcgcggcgcttctgctcggggaaagtttcgagcgcaaggacatcactagagatcacctttaacagagtcgtgaaaaacgactcccacagcttggtatcgaatgtgtcggcatcatccggtgccggaaggagtttatcaattagcaacactgcaatatgttcaagactcttgatagtcgcgcgatggttgtacacatgaatactgaaccaggtctcgggataagcctcgcagtcgaggatggagttgtgagcctcaagggtctgagcaacaaatagtgcaagctccaattctttcaagttgggtagcttgggagacgcgatcttggcaatggcagccatgagcgcagacagttccaccaaagactcatcgaagctttgaggggtcttggcagtcttcatctggaaggggaacgccttgctgaaaagcaaagaaagatactccgactcctctactccctcagtggagatagcacagtaagaggcgacgatagctggcatgaatccataaagcagaggatcaggctgactgagcaattgagccacgattgagttgctcagtcgcacctgatctcgatacaaatccgagacgcctgaggtggaaccccagtatggagtcaaccagccaatacagctggagatcaatgttcgtctctcgtcgccggaggcgaaaacatcaaacagagtataattctgaatgagaactagcttatagagtatcaacatgccggtgacatccttgcatgaatccatgaaactcagagcgatcataattatttcatccttgctcaggacgttggagagctcaggtagccacgtatggaaatgttgaactaccagtgttttgctgcccaccaaagccggcgacgagtttctcatcaaagtctccatagccttgaaaatggtacgcatgtctctgttgaaggtggattgcaccgtggtgatgccaataccttcctccttggccttttgctgctcgcgagccttgatgatgaattttaacagatggcgtcccaccttgaaggcggcacggagattgcgagattgcgtaccgtcggtccctgcgtttaagaggcgcaagtagcttcgaataaggcacggggtgacgaatgggaagttgaactgctcatcggcgtaccggtcgaccagcgggcctaggttgtatcgtcgatcatggacaattcccagaacagtgaccaggttgttgaagatcaagttctcgtattcttcattaccagcattctccaccaggattccgaacagcgcgtcgaagacaccacttagttgtttcacaatctcgatttcgggaacaaaaagtaaacgtttcagggtatccaagacctcgtccacgggccgctctcgccagttgagaagactcagaatgacttgatcctgggagtactctgtgctgcaaagatgggtttcaaggtgcaaagtggccaatggacccgtcacagcttcatctttggcggattcattcttgccgagcgcgctccatgggaggttcagataagcaccctttccattctcaatgctggatgtctgcttgtcataagcatgcaacagcagagaatgatgcccatctctaatgaaagcttgctgatcccaaaggggcatccaggcaagagcaaagggaaattctggcgcatctgcaacactcatcactatgtgcgagccagggatttgttctgtggggatcttgaggcggatggtctggttccaaggtgtgccgcgctgggcgatggtagtgcgccatgccgtgtttgaagttttggatgacgaagggaagacacatttgtctatccgagctcctttagaatcacgtacttcaagagtgagttgaagattgtgaagtccgctggccgcctgcagaggaatttgacctgcttgcgggtgagacaggagagcatctgtggggaataccgcctgacagagtgtaacgtagatatcggatcttggcttcgtaggagccttggagaatccaatgcgctgtgtctgtatgacatcgtgcaatatagtaggattctgacgaatcaggaattccgcatcgcaactggcaaaggggcgcagatggaggtgtaaacgtgctgcggggtcggcacgtacataccggccggtgggactaggaagcaaggcgcggatcaacttgtcaaagccatccgtcagcccctcgccgtcttcgccgtctcgacggggcgaccaaatgttgatcacttgttcagtgtccttatcctgtcgaagaatcggcgatatctccaagatcccaacgccaacagtacggatcgccgagacctcctttgttggtgcgggttgaggggtggttgtgtctttgacgctggacgcactgctcgatgttcgtggaattccttgagtaatgggcctaggtggctgatccaagctcggtccgcgttgcttgggtgtccacatcatgctgcgtcgcgttttcaaactacccttggccgaaggttgaacactaccatttgtcgtggccttggttggggttggggtgtctcgcgagattgatggcctcgacacaggagtggtatcagctgtggaccgggtctctggggcacgaacccaagcaactagataaagctgccgcccattcggagatccatctccgatgtctgttgcggccaattcggtgaacagtgtcttcagtctactgctttggctcatgttgacgaatttatcaggagacggaatatctaagctataggtctcagataatggactgagtgaaccagcgtctgaccgggagaacagctgtattccgatagtcacttgccccggtgcattccctgataccgcgttgatctccagcagcaaatgatggagtgcagtagcatcggatgtctgggtgggactggattcgagcatactcatctcggactgcagcttcgccaattggatagcagagtcatcacccgttagcaaacggcctctctgctccggatcgcgaacaatcacgtccccgctaagcattttgtttgccttgacaagtttccagactgtgtcgttccgcaatgcttccttctcctttccagtcagaacattgtgtagtaattgtcgtctcgcaaagtccagctcttgtaccacggttgacatttcctccaatacatcataccggcgtgccaaaagtaattcatgcaaattagtcgaatgccattcgcgcagacacgatgcgatttcatccactaggggctctgtgagagaggtcggagtttcatcgccgatcttaagcatcgggacgggggcaggcggcttcggcgcatcagggtcgcgaggagcaaatgagacaggcgtatgcgggatcgagcctgttcgccatcgcggacttgcctggtctgacccatcggtcttgtgaatgataatctgggaaggcttcccctttttcgcaaggacgacgtccgacacctcggcaacagcctgaaagtcactgacggaataagccagactatttcgggacaggaattctccatcccagccggacaaggtcagtcgatcaatgcttttccggtcagcatttagtagtgctttatatccatcgccgtcgcctagcacctctctaatctcaacgcagttccgcgggaagatacccgagaatacacgagcttcgagagtttggcctttgatgcttgtcaagccggccagtaacgacggcggcgcgactagatagcctcgacaccattcgccgtccgtccctccttgctcaattatgtaaagctcatcgccaagctccaatggtagatctgcgggggaggacgggttgaaagggtatatggcaacggcaaatgcgatgcgaggcagcggccgccagggcatggctgtgttgtgaatcgctcgacgcgattggagctcgagatacccgatttgaggtgtgccagtccccgcaaatgggtctccgatcgcaagcctcgcgggaagagatttcgggtatgtggatcagttcgaggaatgttcgattcggtcaatcgaaggcaacatgtagtgggaggagatcttagtcgtcgagtcccgaaggggggttgaataacgagaggaatgcgggaattcgaggaatgcgacaagtaacgatctaaagaggcatgattagggaggtacaagcgggaccaaaggaattgtcgccctgtcggaaagcgaggaaagagagcacagagactgtagttctctcatcaaaagacacgaacgggagttctggagtgttgcaattcagagtatctgtgccccccttgggcgacatttcggtggagaccactatttagaggcgtggggaaaagactcaccgtatagaaaaaaaaaacacacacacagggtaagtcggagggaaaagagaagagagatgtcagatagattgaaaggaggaagaagattaaaatcgcagatcgaagatcacccccacactatctcttagccagaagctgggactttgggggataactgctttcgccttgcttcatctgttagctacatgatcacaaggatactttaagattacatctcctaacatactattaatatgcttgtaaaacaataattgacaagtctcctgaacacaattcattcattattcacccgaaacagtccacatttaccatataaatgtgacaaggtcctataagatagcaacacgtacctacatagtacttcacctatgataccaaatgaagccccgaacggtgggtcaacatggccaatgagaagatataatatcttacataggaaaaagcaaaaaacaaaacatatgaatcagtttcaagagtaacatctcatttttcattatatttccagggtctcgtctctagtagttggtccgcgggtgtttgagaccttaatagttctatggtatggttggctaagtacataatgtatgcttcaattagaatcctcaagctctagatatcgtgcataagagtcatgccttaccttcacgtccaatacacgaatagtcaaaagcttaagtcgatccgggtcttctaagagcttcaagaagtacttcatctggaggctagtatttcagaattgttagtatcaaggagttcattatagtcatccaagataaaaaagacgaagtctcgacgcaggacacacaaactattacagcagcaatagctactatatatccacgacaatgagactgctgatgaacttaaaaggaaacttgaggatatcgacccagcctttagtcagaatggtggacgggattgttacagggactcccctgcctgattaaacccaggtggaaatgaatatccaattagctcaaaggaatccgagtttaagtgacatgggtgctgttctatttggtattgtctgtagtttggatcttcgcttcttgagcaattcacctcaattctcacgtctcactgtgcacctcgatatttgcctatttaggccctacgcttctcattgcactaaatcattgcgtggtcggtgtagactttcccgaagatggaatctgaatattacaaagttggaatcggaatgagacagaaaaaaagcaaaaacaaaacaaacgggaatagatttaactctcgatacaaagtacatcttatttccggaacatgctaagggtctcttccttgcgccagtccagatccacttgaccctcgtagacatcttcaatgatctgccgaatgcggtcataagtgttctcataacggttctcgcactcccggagcaccttgacaactaggctgcgactaagaccagggtcatcagcatcaccaaagtgtttctccacacgcttcttgagcatctcgatgccacggcgggtttccttgttgtcgtagtaggtgagaaccttcttcgccaccatgcgggagtggctggcgcgggctgcgatgtcagtcggcttagcgcccgccgcgaggaggttgtcaattgactgcacgaaatcaaccaacttgcccagtgggcgatgaatgaccgcgtcgaggtagagcctcaggtgctcttggaagtcttggtgagcacgatcggtccagcgttcaagtgcggggatgttgtgcacatctacttcctcgatgtagtggttcatgttctcaatgaggagaatgtggtagttcaggatctccttgtcttccggatcacccgcaccacccgcagtgacacccggaggttgaccgggtgcttccttggcaatgaacttcagtgactcccacatcgcacggttgatgcggtcgtacgcgtcgttgacgctaacgcgaatgtcacagaaagcgccggacgggaatgacagcatgctttccaccgcattggagaagttagggaacacccgcatgaaggaaattactcccttccgcttgttcaccttgactttggtgtcctcaatgcctcggatttgctcatctacaaatcggttgaacagtcccatcaggcgggaatggattttctgtagtgcatgaagaatgaactcttgattcgtgtcatcaaagtcattcatggcagtctccaaagaatagagaatcccgattccttggagaggatcagcctgcatcgcccagtccaccatgttctgcatctcagtgggccagaatgagtaaatctcatccattatttgctcgactctctttgccattgctcggtcaggatcatgcggctggttggcagagaaatcgggacaagagcgattttccggaatggccgcagagaccaactcggaaaaatcggcgctggcaagtgaatcaagatggaagaattggatgatgaagttctgctcctgagccatcatgttcagtgtctcccgcagcgtcccggagaatgcctcagacggctcagcccttccttccttcttcccgcctcccgaagccagtcgaagcccagcggcagcccgcaccgtcttgccccgtcgcacggtcaattttcgtgcagccatggtgagaccctcggcttctttctccttctcttggtgcgtgaagaggagttcctgctcatcacccgttggtttgcgtgcggtgttcttccaagccaggttattgtcgcggaagtcaccttggtacgaaggcttggactgctgctcatagagactgacaaggctatgccactctgccatgctaacctccttagcaaatagcatcaaggcattataccgccagacctcctgacggaagtgccctcgtgcggcgctgtccaatttcatgggatctttggcaccgttgctccagtcaagacgtttttgttctgccattttgaaggcaagggccatgaactgctgcagtcggttgaggaacatggttgcaatagagcgatattcttccttcttttgcttgatcgcacgcatctggccgatttctgtatcagcatacacgccgacacttgcatcgacttgacgtttcttgttttgtccaatgtcagagtcgatcgtaaccatggccttgtacaacgtcgctagagcactttcagtatccttcagcccatcgggattgctcaaagatgcctctttgagtggtcccagctcggttacagatattgaaagtgtcttcaaaagggtctggagttcgttctgcaggagcttctgatttgctgtttgtacctgtagaccttggccttgggcttcgatataggcgacatcctcgtgaagagtctgtaatgtggtctcgttagccaactgtagatcaattccgatcccgtaatcccgaaacttacgttcagttcatgggagtaaagagtcaaaagaccatccagctcgtcacactcttcaatcgttctgtcaatcaagcttgcaagttgttcaacctttccttcctgttgttcaaggttcccaagccagctggtggcctcgacacggccaatttcccggcgaacatctgcttccaaatcctcaatcttctgttcatcggccaaccgtccgttccagcccagatcagtgaggatgtcatcaaaatcaataccacgtccgtcgagaatgccgggatcgatcccaagggcctggcaatatttcatagtgtgatcttcacggcgtctgcgacgacgtccttgagttgccggggatggtgaccttgaacgatcttcaacatttacgacaacatcagaaagattctctcgtgagacttcaggagtttgaacaggggtcaccgcgatctcttcgggtgctggctctgtaatctcgacggttggtgtctccggccctacagtgggtgcaggaagttgtagatcttgttccgactttggtaccattggactctgcgggggatcagttagggatcgggcaagggacggcgccggaacaacactggtgatgccatcagggcccgcgagatcggcctgtgactttttcgcggctgccagcagtcgctcaccagccccaccaatcctgggcttgaaaccagcataagcatttgcagcctttttccatgcgcctgcgatatccttggcgtccttcttcttgaccatagggccgagccccgggcgatgcggctcgaattcgccggtttctccggcctgctctgaggaagcttgagatggcgagtccgcagcaggggcagtctcgataggggtcttgggcttttcattggaaggctgaataggctctacagagggcagattcgcagccataatagcggcaggctctgcagctagtccctcaattgccggcgacgaagatggttcccggggctgcgcatgggctccagctaacaaattatctgatgcacttctctcttgaggcagagaggggtgattaaacgtgaatgccttatcaccaccaccacgttggggcgactttggaccaaagctgggcgtggggcgtgggactgtgtccctattctcattattggaagaaccagaagtagtaggacgaagtgtatcattgctgcgcatgaattctggtgccttagctggggctggttgggtagtaagaggcgggggtttgggaccgcgatcctggctgcgagcggaagatggacggagtgactctggaatatcggcatagttgctggattgtgctgcaacagtcagattatccgttcccctcgattctgatagtgaactcgggggcattgcatgtgttgcgctacgctcggctgcgcgtggcggcggttgctggtccagaggtggcccagaaagaagcgaatggggaggagatttatgtagatcaaagggagatggcgccggtctaccgtgtcctgtagatggccgagaaccggtcgacggccgagacatctgctcgcggctcttttgggtgcgaagtgtggggtcttcagaaggcttcctcttgacttcccgaggcccatcgcgactggtatcacgacctctgtaggacggctgtagcgaaggaggtatcgagctgtctgatgttggaggtattggaccgggtccccttggcggtggaccacctggttgtggtggctgtcctcttggtggtggaccacctggttgcgctggctgtgctggctgtcctgattgtccatgccttgacaacatttgtcgctccttgtcatcaaaaccaacgaggttggggacctttccattggtgtatttcttgtagatcttgaccaggctcccaatgaagaactccttctccttagaagtcctggcatgccagtagtatggctttccgattgtgaccgtgaatcctacattgcccgcccattctttttgttgctgctctcccggtgttctcggcacaaaagagccgaacgtttgaattgcgcttaaatcgtcgagcatccaagttttgccaatagagtaggtcccctcattgttctctcgagctttgtgtatacggactctacctgacttccgaaccgatataataatgatacgcggtttcttgttctccggtggcccgtttggcggggaagggctagaagggtgcgccgaatcctcggtgatgcgaacgtgtgttatataggattcgagtactggaagtaacagagagattagcagaggtcgccggcaaaacgaagcaaacgccttgcgatcccatctaggccctggaaataactttcgtaatgtgttgccaaccataccactattctgtgggagggcaaagccgaggaaatacgttggtcgtgtacgtacagagaccatcttcatccttttttgcgaaacaactatgaatgatccgcttcttctcatcttcaaaagcagcccctcttgtcatagtgcttgggctggaacccgaatcggagtgcagatctccacgattcagtggcggccctggcggaggcccacggggacggtctctgccattcaccatggtatcgagggacacagagctcacgtgtgggtagccgcgagatcaaggggacatggtcgggagggtcgggatcgggcgacgccactacgcaccacgcgccgaaggaattgaaacgtgtcgaggaaataatgcgcttgtaaactgcagaatatgatgagggacaaagcagtacacgttgtggctcaaagtaatgcaagtggccagcgctgaagtttgaattagctcatcaatgtgtctcggtggaaccttggaaggcggagagcttggagcggagtatcggagtatcgaattgatccggggttacctatgtcaacaaacgtgcagaatgtcagagatgaatgttcaattgagcgcagatttttcatgacgattgcttactggcgcttcactatctcacttactttggctatcctgatacactaagatgttatcgcagtgcatggcgatcatgactttgatcttattggcttctaactaactaactaattgccagcaaaaagttagtcatccatccccagggccggtctggtttcagttgtataacatgcgcgatagaaactgccgatgtaccataccttcaagacattacatacattattcgcaccgcgttcgatttccctagtcaatttgtgtccaccattccaactgcaatcaatttcatcactgggaataagaacaagcttgctgaagctagagcaattccaggtgatatggtgcagctttcaatcaaaagcgaaagtccttgaaattcaaggttctcttgaagatattgtgcgagacaagtgtcaaaaaccagctatagaagtgtccagctttcagctctaatctaaagcgaagcaaatcagaatcaaaagaccaaccggttattcagaaaacggtgactcttcggtatcaaagaggacagcatgactagaagttctttattcaaatgcagatcacatgtatatttccgaagttgacttcatgtatgtatgcatccatccatatcggtatatggcccaggtaaactttgagtgccctgaattcaggggcactattttctgtcaagacagggccgttgacctgtacaagcaaacatctatcttgaacctggtggtgctctgatatcagggaagtttcagaccggcataccatgtactagtatttagaaagaataaggcacaaaggggtggagactcggtctaaatatgcacatagattagatccgactagagaccgcagcggtgaagagatgtggccaataagagagcccttcgtagataatgccgaaatatccgcgcaccaatcacaatgcttactcatatcaaccaataacagtgaagctgatagcttaccgccttttatatactttttttttcctcccttcttttttggttcctggcagattatttctaaatagtctcttcttgccccgggttctcttccttcgctaccgttgaaacgaaccgctcagtcactatggcaaaggcttccagcaagaagacttcggtcaagaaggtaagcttcatttaccttcgattgacatatcgattggcatgatctacaaacagacctgactgacaatgccctaatttcacagactgattcttccaagaccaagtctatcccccctcagctgatcgcctcagtcgcggctttcttgtcggacaatttccctcagactagcgtcgccttcactaaggaagcgacaaagtcgggcaagcagagcgatgcgaaaaatgttccctctcttttggaactcttccaagcctcggagcagaaatctagcgtgaagaagtctgctagccccagttcttcttccagctcaagcagcagctccgatagtgactcggatgttgagatgggtgaggccactcgctcgtcctcttcgtcttcctcttcgtcttcgtcttcctcttctagctccgatagcgatgcggatgatgaggatgacgatgataagtctcctgcggctcccacctccgcccccagctccgctccggctcagaagtctgccggcgtgaagcgcaaggccgagtctagcagcgagtctagcagctcctccgactccaactcctcctcttcatccgaagatgatagccctaaggccaagaaagccaagacatctcccacccccaaagaggcatcttcctcttcgtcttcggattcttccagctctgactcagactcctcgtcgagctcctcttctgattcttcgtctgattcctcctccgactcttcttctgactcctcttctgagtcttcctccgactcctcttctgagtctgagtctgaatcagagtccgaatccgaaaaagaatccaagaaggccctgaagaaggcaaagaagacacctctccccgagtccgactcctcttctgactcggagtcttcttcatccggcagcaccctcgccgcttccccagagaccgagaccaagcccacaaagaaggccgtggagactgtgcagactacctcatcgagcgccagtcccgctcctggcaatggacctgccaagaagaagcacaccggagctcgccctacccctctggccctcctgagtgaattgccccatgaccacccctcgaacgactacatgtcgtacgcctatgcagaccgtgcctggaaggacttgtctgtgacccgcggcaagggattcaccaaggaaaagaacaagaagaagcgtggctcctaccgcggcggccccatcgacattgcccccggcacgacctcctacaagttcgaggattaaacgacgacgcttgcttttgccacacgaacgtatttgctagttcataatatcaggctatcgtcagcatctaatccaaaatttgccaccaaacccaggctttttgtcttggatgtcgctttgccgaagggaagaatcgctgtctttttgctgctgcaatatttgcattacgactcaggtttgttgcaatggatcaatatgaacagccagggctcttatatcccgcatcattctttaccaatttcactcagcatggcgtatggagctatggacaaggtcgttggacccaagatttgccatagaatcttttttgcttattagcttacatcattcaaaagtttgaaatccgtcctcgacgaattctggaagtattttcaattctccatgaagtaggaaaggacgtaacctacgaacacaaaccccttctagccttattagtctctatcaaaaacagtgttaggtacccccgtacaaaacaaaaaactataaaacccacaacctatccatcctgccttctccaagccccaggctcctccaaagtctcccacctacaatcccaacccgtatgcgtcccacgagcagcatccccaggcttaagatccgcaaacgcgcgctgagtcctcagcttagaagtggtagcggagtcctcgtcatccgggcgctcatatccagccaaattgaatgcctcggcgttccagcgcggtaaactccccggacccatattcacacccaggtccagattatattcgtaccactctttccccggaccggttaagtcatccgtagacgcaaaatcgagctggaccaccccgtccacgatgcccgtgtagacggtcggcgaggagggtgagggtgaggacattgtgtagatggggccgcggtaggggcctctttggcgggtgcggactgggtgtggagtttgttgggggaatgtagggggtggtgggtgggagaggaatatggagaagccctttttagggcggggttttgcttttgttctgggtatggtgttggcattgaattgcgagtcggggaattgtgcatcgaggtaactgtatgtgttgcacatgcgtaggtcgaagattttgaccacggcttcgccgccagctccggctaagaagcggtcatggccgaaggcgtggaggctgtaaatgggattgaggtccgtggcgtctctgtaggagacttcggagggccttggggagcgcaggtcgtgaagtcttacggtgtagtcgtcccaggcggttagaaagacttcgccgggggagcctaggttgtgttcattgagaggctcaatggcgccgatattggcctttgatttaaggcttgtagagtcggcgtctaaagaaccaattccgattgttcgatatacagagacaccgtctggtgtgattttcgagatagacaaggagttttccacatttccagttcccactgccactagtgatgaggatagcagtttggagtagttggttcgtgacgagccttccagtcgaagccatgtaaatggctcgattacttcgtcgtcagtctcggtatgatagaaagcgatgcttccattttcaaaatgagcagccaaagtagagtctgtgccactactcaaatctgttttatcgaggttgagtccaaatgatataaacttctgcttgtgctcaaaggttgcttcattgggagagatggcaaggtgaacaatatcacctcggacccgaccgaagatcagatgctccacatgggtatcgttgctgtatcgagtcgctgaggacaaaagatgcagagaacaaatgtcgtcatagctgctaacatgatcaatatcgttaaacacaagccagtcttcttgcgcgcgaacaccagtttgcttgatcctcatcacaagctgattggcagcaccccaggcaaggacctctttcctatcagcccaacgctggccattccaggtctcgtaagaatcaattgaaggtctgtacccgagagtcgggttatcttggcgagtcacctcgtgagaaccgattttggtcgcagttccaggtggcacgacaaatcttccgatgatggcttttctgtccaaggcccgcgacctagaggtcaaagctcgtgcagcatctttccagaatggcggtgtttcgatatatggaaatctacttcgcacaaacgctcggaagatccgagaattttcagctgtgattatgccgtgcagtcggtgacatgtctgggacagatgggccaatgcattggcagtcgggagatgtgttgcgatttgataaatgatctctgatgggagctcggagagcatcttgaacgcggaagccagacagagatgtgagaagagtaattgtttcgggctttcagactatcgccatcatttgttttccgccgcttttatatgttttgctgttcattgagtgtgctagaaaggggaagagctccatttgttcaaggacaagtagattcgagcttcgatttatattcaatttgacaattttcgaccgtcaagatgttgcaggtcagcaatttcatacacaaattgccccatgtgggcactggacccgttaccttatgacgtaagcatatgggctcgcttgggcagcagctcagcctgtcctctttttttgtgcaccaaaaaggaattgtatagatactggagcttcaaacttgagaaacaagactacattaacgtgtatagtagtttctaactccaaaggaaaaggatctgaaggcacagatgcagcaacgtagtccattatgtacgcttatcttatcgcattcccggggaagttgtaatgtcacaggtctcgttggacaagacaagtttccctatcgaatctaaaggcgcatatacactctcctcagcggaatctgattcactggctgtccaccggcagatgacgaatcagagtgagtgggactcgaacggtatggggcttgtaggttaatcttgcaattagggaacacactcggcaccacctgtaatacacggatgagtgttggctggtctaacagctagtggcatagccgcgtcggcaatccccattgtatacaaccccgaggtccggagggattcccagcttttctcatatttgcaaagtatctagattttcaccaactatctacagtggacggcaaacaccggcactcataatggcttattcgatcactgctcttgcggcagcattcttcgctggcctcatcttctacagagtgttcatttacccagtgtttctctccccgttgtcgaaaatccccaacgtgcactggagtgcttccatctcgcctgcatggatgttatggaggcgcttcacaagccgaaataaccggacaattcaggccgcacacgagagactcggtcctatcgttaggttaggaccatcggagatctcgattaactgtgtcgatggaggaattaagacagtttatgctggtggatttgagaagcatgactggtacccacgagtcttcgggtcatttgggttagtatagacaccgattcacagtaaacaaagtagctaaccatgagaaacaggacagtgagtatgttcaccatgacaggaagcaagacacattcaacccgaaaaaggatgttgtccaacatatactccaaatcaactctgcaaacatcccctcatatgcggatagtttcagacacagtcatcttcgatcgactgctgccgattcttcaagaagtgtcaaagtctggcaaatccatcgatatgcatgatctagaccagggcctgacgatggatttcgtctcctcctatctattcggtttgcagaatggcactaattacctgcaagacgattcggttcgtaagcactggcttcacctttacatgtgccgaaagccgttcgagttttatgcccaggaggttccatatttgaatggatggctgagacggatcggtcttcgcgtgatacctaaatactgcgacgacgccaatgaaatgcttgatgcttgggctctggacctatgcgatagggcagagcagatgatttcgtcgaccgagccaggaatcgagccaactgtctacaagcagctgaaacaatctctggacaagcattccacaaagaatggagaagcaaagccagataaggcccagcaacgactcgatattgcttgcgagatgtacgaccagctgactgccggctttgaaacaagtgctgttggtctgacatatttgttctggcaactctccctacacccagaagtgcagaacaagctccgagaggagctactcactctgaatcccccgattttatatcccaagacagccgatctgccaccagccaagtcaatcgatagcctgccactgttagaagcgatcgtgacagagaccttgagacttcatgctccgatccctggcattcagcctcgggtaacgccatctccctcgtgcattttggccggctatgcagacgtcccacctaacactagagtgaatgcgcaagcgtattcactgcaccgcaatccggaagtattcccagagccagaaacctggcagccgaagcgttggctggaagctgaaaactcgccggctgatttggaagagaaacggcggtggttctgggcgtttgggagtggaggacgtatgtgcgtgggaagcaatcttgcactgcaaggtatgaatttaagaattccaaccattgaactatgctgattactgcttggcagaaatgaaattggccgtggctgcgatttacaccaacttccgcaccacgattgtcaacgatgacaacatcgaggccatcgatgcttacaccgtgaaaccgacaggtgataaactgatcctcaagttcgagtctgtctgagatataccaggaggggatcttgcaagtgcagccattgctgcaagctgtatgagctcggaatagaattaattcgatcaatggaaaagtatcaacattgcagctgaaagaataaacactgcttcccgccagctcatgcaatatccaagagcgtaaagtggctaagaatgatcgcaaatcgtgatctaataagctaggatagcaacaactcctgtccccggtttcggtagcacggccatgttcggcctcttcggcgagtgtagtatgcagactcctaacagcccgagagcccgaggatactaaagaggagaattgagagctgcgagtagaaatttgatccagcaaagttcgcagttcttcataaccctcatatcagccacaatccatcaggcaccaccaaagagggatggcagtgacattagatcgtgctgacctggtgattgatcattattatgtggaggatccatacacgcatatgtaggaaataagagttaatcaattgttctgacaggtccaaatcccacatagttgtatactgtacatatgagtaaaagccaactcccatagcctctgatgcaaaataagcagaccaaatcagaaaatcctgataaaggccagagtattcgcgtaataatgtatcaaaaagaaacccaaaactccaggtggacagctcgctcctgctgccaagtccggatagtcgtgcaaagaacattttaaccgagaacaccgtccttcttccgcgggccaacaaccttagggtacattctcatgaggtggtagttgacggtgttcttcttctgctccctggatttctatagatggaaataccttgttagaaggatgctgacaataatgaaaagaacggcgatggattataacgtaccggtgcatccatgcacttccgcaattgagcctcgagagcagagcagccctctgcgccgtatccagcggaagcccagcagtctgtagcaacgcaaattgtcagtcgagattcaaggtacttcgaagccagggcgacgagaaattgatagcgtcaatatccctaaggaagaggaacaaacatactcagcatagaggacatcactaccacgcaggggttctgctcattctgattcggccggcggacacggaggtggttgatggtgttgagacgcatcgggttgagccgggtggagagggagcctttgggtgccatggtgggcaattattaggttcgtagaactggcaatataggtatcaattggaacaagaagaggccgaaatgccttgaagcgaccgtgtgcaggattgacgatgggatactggcgccggcgacggatcttcgacaaacaaaatccgaagtttcgactccgcggaggtagatgactaatcttggccgcgcccccggccctcttcatctacctcgagggcttgccaccctatttacaagacctatacactctttttgatattgcaagtttgtcaaaaccaatacatggttgttgaatatgtctgggagatacggtttgccaacacagttccgtggcgtttcttcggtatgcacctttagagctccgatagctcccactcctaggcggttctccgcagcatgccacctgaaccaaacatcgtccacgtctacggtcaagacggaggataaagatagtgaaaatggctcgaaagaagaagaaaaagatagtccgatgggacgccgtctagctcaaatgaccgaagatgcgatgctagaaggtggacgatctgcgcgtcgtaacatcgagcaagcagggttctcggaagaactgaaaaataagctcgcagagcgcgttgctgcttcttcatttaggagtcagtatgctgctgctcattctatagtcgaaatgcccgtatgtgatacttataatgtcctactgtccaacagccactaacccacattccattattgcagtctgcggcagggcaaggcacacgagagaacgccgccgctcctccatggacaggaacagagcgtgtcgaggacacgactctgcgtatgctagatgacgcgagcaagccgatccgaatgccttacaaaatccccgaccctgtgaaccttagaatccccccgaagccgaaaaagtcccatggagagcgaatcgccgaagcgaaagagcgcacctctacctacacgctaagtcgggctcccgggttttccgaagaggagcgcgagcatatgcgccgtgagatgagggagaacttgacacccggggcgtattccatgccaatctcgatctcgggtctttcgtcgctggcagatgagcgaattcaagatgcgattgcacgtggagagtttaagaagatacgtcgtgggaaaggtgtaaataccaagacggaccacaatgcgaccagcgcattcattgatacaaccgaatattttatgaataggatcatccagcagcaggaaattgtgccgccgtggatcgagaagcaacaacagcttggcgcggaactcaatcgattccgcgaacgtcttcgagcggactggcggagacatgctgcgatgttgattgcgagcaagggtgggtccttggacatacaaatgaagcgggcaaaagcctatgctgcagccgagactcgactggcagacaaagcaaagttggaggctttgtttgaagaggatacgtccgtatccgagatcaacactgatggccggattgtctccaagccagagacatcccagagatcacctacaataaatgacagcgaaaaagcctccgaagatctagcccatcttccaccattgcgagaccccggatacctcgcaatcgaacgttcttatcacgaactcgccgtgaaacaaatcaacagtctcacacgctcatacaacctccaagctccagccgccgcccacaaaccatatatcaatcttgaccgagagctcaacgcatgctatgctgcggtagcgcctgacttggcagaggaaataaaacgccgagcgacagagcgtgcgcgtccgtcatcaaccgttcccccggtttcttccatcaagtttgggtcactaggaatggcgcagtctgtacatgttcgcgaagaagatcagtcgaagggatacggtataaaagagctgtggcgcgatttattcactaaaccctgaagacagcaaacgacaaaacagagaactttcacccttctgttcatcctctgtcaggctatatcggagataatgatacaccaataatgtgacatagaacatgagcaatggcactcgaaataaaacagacaaagcgggccaacaccacctcccgacccttcaatcttttccctcgcaaaactggattggaatcttccgctctgctacgaaaagaggatctccacacgacgtggctttctcgtcaaccacagaaagctcaaagggactccgacgacgccgacggtagcaacaataccaataccaagcccattgatcaaaatgaatgaggcagcattcattgtcctcatgccagcagcggcagcaggcaagcccaggaccaaacagagaatagagagagcagccacaatgaatgcttgggcgaggctagacaaaagtttacgcttagccatacgcctgatcgcgggcggatccgcgtaaagacttgatgattcccgtagacctcgccagtcgaagatagctgcgctgacgcaggtgataaaatgaaagtacgtcccgaaagcgaggagaaggaacgcaaccccgataaaatatgccgcacatggagagatgctcatgtacatgcccaggtacccattctttggattccaagcctggcaacaagcctcattcttagcccacgagggaatttcggtagtcatattgctggcttcgtctcgcttttgcatggggatgatgaaatgatgccacgggatctttgggaagtctcccgggggccagccggcttgctcaagatcggaatcgccgaagggtaaacgcgagatgacttccacgtccccgacccagatctcgttgacggcgttgccttggtcgtagaaatggtctgacttcacgccatggactgcggatactttgttgcccattcgtgccttggacaaattggtgtgagaataatggggtggtttaatgattctggtacaaagtagtaatgattcttgtatagaaagaaattgatggatgatgaggatgagttgggcatctttctcagttgactgggcaggtaatcccgaaagcagcaaaaagggaaggtgctttggtgtgttccttagtgaaggagatggatattcttgtcaacctcgagggtttgcatctattctatggtgaatcgtcctatctcgataggaatgctcgataaaaattgaattatactgtagcataatgtcattcagagatactcgtcatgcagataattgcactacggcacttggggatatatctgaatggtaatatgcttgatttcagactaatgaagtgtatttaagtatccatactctcatgtatctcatcctttatggaaatgttctaaaataggtcaaatggacttttgcggcagttagtgttctctcccctgtgagtggtcgccgcgatgtgatgatcgtgcatgagggcgcgtatttctgaccaacgacaaggctaaactagaatgctttgacctgggtactgactttctcttcacttcatcacatcctatgcttgcttcttatacgtagcccctccctctgtcgcccctcctctgcaacatgtatcacccgctcgtgtgagattcgacgtttgaaatgtcgatcagtgactacgacttttgaaattattacttctcctcacccccgatctcttttataatcctggcggaaatgactaccccggttgtcttctttttgcctatcctttttactgtcttgattgtacatagtacctcggttcaggcccagaaggtccaacgtcaatcaaaacccgctgcgcccccaacagtggacaagccattactagctattcaaattgggagcattgcgggcgcctatgtgatcttcgtcgctgtcctcctagcgctacttatcttcgttggacgtcgcctgcgtcggacagttcagtcgtccaactatacactgcatatggaaattctgaagcctgtcagacctcctgtcagcatggatcccagcccgatttctccagtgtcacacaatctccctagtcccagatcaagtggattcaggtcctgggggtccttgaacagaagtaccaggccgtcccaaccatctatgaacggcagcatggtgaccatcgacgagtccatcgtcgcgaatgaccgtcaacgagcccagcatgatatggagatgctctatgcggcagttatggaacatgacgcccagaaggcttccggaattgatctgtcggtccgcgaacaagacttccatgcacaatcaccggacagtcaactcacaaatccattcactgatcgcggctcccacggctcagagaactcattagcaccattagctccattgaagtcccccaccaaaggattcaacagctcccgcttatccaagctcttcaacccaggctcccgcgccaatccagacccgagcaaagtgcgctcgccgcgtctggctatccgcaaaatgcctatctcctctccattagcctcgccagcagtggccacgcctcaagcctatgtgtttgaaaacccgcctctttccccgcggatttacaaccccggtcctcctccaatggtgccgcagcagcatgcgagtgagtcaatcaggcctgctcctgggcgtgcccgcccacctgcgcctctcactctgtctaccccctccccttcttcttctgtcccgtccaacctgcctttccgggaggcatacccgccgcaaagtgccccggctaccaagaccactatcttggaacgaccgatgaagaatcgggcgggtcctctcacgggcatggctacaccatacagtccgtacatgccatttactcccgtgacgccctttactcctgggcgcacagtcacaaagcgacagcggaagcgggaggagcgtgggaatggactgcaagtgttgaacgaagatgatttggttaaggatgacaatgatatctggggatgaatgtgtcaaatttagtttaggcgttcgagtgcattcggttcaatccatcgtttatctatagagaactgtcacacctacatacactggctgtataggtctatttcagaatctaatatcctgcatagctcgtctctagatctatatctacatcttctccttcaaatgtgtattccctctaacaatcgcctcagcaaaatctgacctcgtcccggccttctcaaggctcaaaagtgtctgaatagtacaccccctcggcgaagaaatactctccctaacaaccgctggatgctgtccagactccaacacagcagacaatcccctgatcccctgcaaaaccaactccatcgcatccgcccgcttaaacccctccgcaacacacccatccagcaacccctcaatcggcagcgtcaacgtcgccatcgtcgcgccaacaagcacagtcgccaacccgatctgctcagctcctaggtacttaaccgcaccgacatgcttgaaaatccactccgtaaccagaaccatggctggtgggattgacggcgccggcgtttcgatgatcgtcatcgactggccgaactgcgcgcccatgtttgggatagctttcatgaggtgcggttgatctgcagcgccgggatctgggttgatgaggcgggttagggtttcgcatgattggcctgcgagcatgctgatgacgagtttcccagcgagggcgtcacggacgccttcttctcttagaacggcttcggccatgaagggcttgcagccgaggatgattacgtcggcttcttgcattgtttggacggtttggtcagagacgattttgattagttcttggtgctcgggggcaattgttttttcgagacgggatgcggaactggctgtttttgtgcaggcgataaagcgagttatgggatttggtgttgggtcagtgcttgtggctgagagtacgctgtttaggaggcctttaagcacggcgcctcccatgttaccttggggtttgttagtggtagttttactatgaatgttatgtttacttaccgcatccgatgaatccaagagtctgtcctgaggccatgatgttctgaataccgagagagacggagagttgattgagttgaggggtttggctatctatttgactcatatgggatctcgggtgaggtgtccgacgttggcggcagccgatgccgagattagttttaattatttaaattgcagaagaacatgtttagaggattatcttttgaagctatatttgagatgatacgtcaattgccctcgaatgattccccgtgcttctttccccatgtctatgcaagattacttagaatatcacccattgctggacggagggtcaaatataaagcccaattccttgcatgagttatcttcgagacctgcaatgagcacaagtccattcattccattattcacaaataatatctgatctttgcctcaggcgctaactccgccttacaagtggcgtataacagattaccgcattgggcttggcttcgtgttccccaatgcagcagggattcccgctatctcttcaatcttcaatctttacactcactccttttttgcctaagaccctctatggctgtcaagatctaagcctggacttaattgtcgaatgaacaacactgttgtctttttttatcgactttgctgatcggccccgctattcccccacctcacaagttgcaactgtcgtcatcctcggagaagtcgacttgctctttccggccgagttattttggtggacagtactcccgtaccttgtctcttactccattagaattcgtcgtcggataacttgtgtgtacaataagaggctgtaagttatctcactcttatcttggcagaggcgcggtttggactcggactgtcttggctaactggaacttcttcgcaggtctcagactttctctcccctttcctccactactcgtttacacctctctgtttttttgtgtttccagtacggaccgcctacatgactctcaccgtcctctcccaaacccagctccgcgagctgctgcacgcgctctctcgcgacgagatccttgaattgcagcgcaatctcggcgaggctctacgagaatactccagtggatctcaggaggaaggctgctcggcagcttaccaaccccagcgaactgccattactcgtcagaatggttgcaccaccctcttcatgcccgccagcacgggcaagaccattggcatcaagatgatttccctgcaggacgggggcgctgccggctgcgctaatgaacaggagaccgtggatgcacaggagaaggaccagatttcctcgcgcagacgaggctctttccggaactcggtggcttccatatcctctgatttgagtgatttatctttgggctcccaagaagacaaggaggacaccaccaacaatgacagcagtgtggcaggatcaagcacggatagtcccacactcctcactggttgtgtcaatcagcaaaatgtcacttcgaatatttctagaactcttggcgcttggccgggcgcaggaactcgtgacacatcgccgcgcggcagtgtgacactcctagacgacgaaagcctgccattcgccttgatcaacgcccatgagctgacggcattccgcacggccttggcttcgctgatgatgttcaacaggcgcaagaaggtgcgcactcttcttgtattcggagcgggcacccaggcttactggcacatccgcttgtcattggttctccgcggtgacgacatccgccgggtatacattgtaaaccgttctttcgaccgcgcagccaaacttctgcaggatatctatgggcctgaaaacagcgaatggcgcggggacgtcaagttttccgcggtcagtactgatttcggcgagtatagtcgcatcttgaaggatcacgtgcgcaaggccgacgtgatcttctgctgtacaccctctccggtgccacttttcccagcggagtacctcacctcgagcgaaggccgtcaaaagggccggttgatttgtgcgattggatcatacaaggcacacatggccgagatccacccagatatcctcagagacgaggtcactgtgcagggtccacatagacactggcacaagcatatccaccgcagtggtgtgattctagtggatagtctcgacgctgccatgaaagaggcgggcgagattattcaagccggaattaaaccgaaacaagttgtcgagttaggcgagctactgatggttcgtaatgccgctcgcgaagcggcgaccgtggatgaggaacagagcttgcgtgagtgggcacaacgggggaacgtcatctacaaatcggttggacttggactgatggatctcgtgactggcggagatttggtgcgcttggcgcgggagcggaagttggggaccaccgtggaggatttctaaatgacttgggcgacttggctttgcactttgccctttgcacttttaacgacttttgattcgatacctttttttgcttattttacattgctttctattggccgatcttttttctctgggcgtctgttgttccagggaaatttcgaagatcaacagatctgccgaaggtgccacaatatctttaaattaagagaaacttgaactggaatacatgtcagaatacacatggtatgactatcaaatagcatttgggagctggaaatgagaacaaggaacaatatcatctctatcatagaacctgaatatcaaagtaaaagcttgcacataacctccaatgatagtgggctgatggtctgcgtcatcgggtatgtaacctccaaggctctcggacaatcttccctctcgtttcaaacgtttctctgagcaatctcccgctgcgcattaccaatccagctattggtattggatcttgccctagctgctctagctgctttagctgctgttggcgcacgagtcttcccttccccgcgcagtgaggggccaacgcaacgataaagaaaaagtctgctctactataagaagccttatagctccccagaatacaccccccagacatcctcgccatgcgcaacaccacctgctacttgcccaatggcctctcctttaatgtatcgcccgttttcgggggagtcaccttcaaatccgccgatttcaacgcacagaactccaccttccccccaggttggacgattatgatcaacaccgagaatgcgagcaagacagacgagcaaggagatgaaccagactcagagaacccccgcgacggtgacgataatttttcccgtttcactacccccaccttagcccgcgattccctctacatttcctatatagtcaacccaccatcaagcgagttcaagcccgtgacctcacccacgcgccagattgccatgatgctctgggcaactctatggtggtacttccacgagcccgaaccagacctgcacgtggagaccgtcgcatcgagcatgaccccgcgcgacggacgaccaaaaggcgtatggcgggtcaacatcaagcgcgaaggaatctttaaaggccgaaaccttctccagaagctcgagcgcatgggactaatagcgaccgaagactcctccgtcggcctccagcccatggaatcccgcgactcaagcagctggtcaacgatgttcgtcagccggcgcagcttctggcagctcgacccacgcctattcctcttcacactgacgccccgcggaggccgtccatcaacacctccctaccggtcacggaattcgtctcccgcgtcgtcagagggtccgccccccgcagcgccgctggtgctcgcgcccatggaggcaatcttccacacggcgaatatgggcccattcacctcagtaggaccgttcacgtccggcagccatctacccacatactacccgccgccgccgatgcagttcacctccacgaacggcgtgcgacaccccgtgcgcccgaaaccgccgcaccagggcgaggtcttctacgtgcgctacatccccagcctgagccagtatctctcattccgcgtggcgtttgtgccgatgaaccccgggggtactgctagtcggcctgggacgcctgttagcacggctgtgacgagcatcacgcaccatctcaccaagaatatttcctcggatctggacacgatgcaccggtggatgaatgtcccgcgggtggaggcgatgtggggtgaaggtggggataagtccgtgcaggagaagttcttgctggctagtctgactagccgccacagcttccctgtcatcgggtgttgggatgggaagccgtttggatattttgagatctactgggtcaaagaagatcggctgggacgacttgtggaccacgtggataattatgatcggggcattcatctgctcgttggggaacaggagttccggggtgcacaccgggttgcggtctggctgagtgcgttggtgcaccactgcttcctgtcggatatgcggactgaatctgtggtgttggagccccggattgataacctcaagtgagttatggacattgatttccaaggaaaggaggatatatgctgacttctcccagactcattaattacctccaagaagcaggcttctacaaagaaggcgaggtcagcttcccgcacaagcactctgctattatgaggatcaagcgcgagtactgggaaagcccggctctatagagctgtcacggcggcgatttgcattgagacgatcacgagtaacgaaacagctagcattacctggatttgaaatttcttgctatttgacttggccatttatcatgccgttagcccaatagaacgaccggtatggtcattgcttattgactagacctttgatttcatcttctatcttctagactcctttccctaggttgacccgacgagaccgtcctgcttcgaaatagtgtattcccagctgcttaggattcgtatcataacgagagagccgtgatatgccgtttcccgaggaccatagtacgacgttacgaaatgttcgatgcttggtccggaggctcccatcatgtcttctgaggctcactcatttcgcagtagtaaatggtagattggcaatctagagaactgactaatgttgatggcttgatggaaataaaggaacagaggcctttaagactacaaagaaagggacctgtcaaactgtctgagcaagaaaaacaatctgcgctcattgcaacatttctacccagactcatctgatgtcgatacggttgcttagcaatagcgatatataccccctaagcccatccgaggctcttagcgagaccgtagaggcatatcagtcctgtcccaagtaacaacgattgtcccatacgacaaagatcaaggcgttagcacaactgcgcattcaatttcgaaaacgcctagattcgctagacccacattctctcaacgcttcgtggcctgattcagataccgtatttccccgctaatagggtcgttgaaagtagcactgtttgtgtacagagaatccaggactagcctcacttcatggaggagatcagctccaaattggggatattgttgagctaggtcggtaaatgtgtgccgtttgccttggagataccagcaaacggaggctgcggctaaagtacggcgtacgggatggccgttgcgcaggagagttcctgaaataatgtcttcttctcccagccagcgggtgttcttgtcgcttgtgtcgaaatttcggtagtattccttggcatcgggatgtggattggcaatagccttcttgatgtatcgggccgtctgggattctatcctggtaatctggtatttgtccgcgagtcttgcgagctctatagcagctgaaatacgcttcttggtgtctttgatatcaaacttgacaaaacggaggtatagccattgaaggagggcttcaaggctttgcttagagacaacgccttccatttcttctaggtccactgtctactcttgggcctctcgaaaatgaccttcgaacatggctgtgaaaactggcgactccgcgcagaggagtcctttggaaattgtgtattcacaaccaatagattggattcggattttaacaacaggaccatgatagagtggaagcgttctaggtaatggagtgttagacagcgtggaagccactcccgagttaaagcctacttacgctgttgcgaaggacccagcatcttcctcatatatctcactcattttcctcttcatagattgactgtttgaaagaccggtgttgcaaaggagaatgttaacgaaagatatggagatggctttgtgatctaagcaaagagagaaggctggaggaagctacttaaacatctgtacctgacaaacaaggaaacaaaggcaccaggccaatctcagcaccaactgccaacgaattcctccaatttcaaactcatagattccctagatctcacacttcaccccagtatctgcccaacttccttctttttcccgctaaaacggtccgtgaccataaacgccaacgcagcgtaactcagtgtactattgctagaagtggatgtgtaatccagatattaaattttctatctaaaattctttagatatggtatagtaattccgatacatagtttgaatttgtacggagtacgcgtacagccttggcatgtgcccctggttggccgcgtggatgatgggcggtttctctggagataaggaagttaagggtaggattgaggctcaggataaggatgattattcgcaagggaaagggggatgaggggttatgaagggatatgcaatataggatcctagaaaactacgcaaggggtgacttcagcaccgccttcgaaggtctcgacccaaacccaacttaaaagtctaggggtctacgtacttatgactatgaccgtagtgagacttatattacagtattatacagcgagatccaaaatcaagttgagtttcattgtccaagtaggaagtaagtacaaggtacgttgagcgcgagcaaagaattgtaagcgtagagattgttggatagcatccagagaatgaaaaacgagtgagacggaagaccacaagcataagaaagactagatgacagacatacaaatgccgacacgaggcagatgcagtaacgagtggaatagataagagagatgaaaaggaaaagacgagaagaaagcagaatgacaactttcacgtaatcaagctcatacacggtgttagatgacatatatgaacatcaaatagtaagtgtgagcgaggggtattggcaacatgtgcgtatcaacggggtgaacagctttttcaaaagcggaaatatggaaatttgaaaaggaaataaaagagatatgggcatgtatgagtgagagcgtaagagtcagtgagataggaaaaaggagagatgcgtgggagtatcggtgattaagtaaagatcagattgctaaaaggggaaaaagaaagagaggcaggagagatcgagaaccggctcgatttagtgagagcgacgaccgcccatgtaagagccggtcgcggaggcaaggaagcgagccacgaagccgccgctgtgcgcgtggttgctggtcttcagcttcttggatggctggcggataggctccgaggacttggtggattcgatgtgggcgacgtccacgtagctgtggttcagtgagagggatgacgggctgcggttggggtccgcgagcatgaggtcgtcggcaccgttcgaggaaaccgtactgatggaagctggtgtgcctcttgagcttggggcgatgctggacgagcgcgagcagagagagttgaaggtctcggcgtgggagagggctggcacgtcgccgacggatggtggggagacagagcgggtggttcggctgggggatgcacgctggcgttggtatgggttgtagcgatcgtgctcggcgatattctgtgcggcgtagtgggtgttgtgcatgcttgggcaggagacgtggctagggagacggcggagagagttgtcgtttccgcgacgcgtctcgctccgggcctcgagcttttgacggcggagtcggctggccagtaggtctgctgatgagtgaagacggcgcctaggggtgggttagtatttgttatgataacaggttgtaaaatgggatgctgtaccactcgcggtgttgctcttgtttgtggagatattcctcatcggcgatacgttcttgctcttgggctatcaagcgctggcggtgggggacgagaaaaggctcgaaataagtgaagagatcctgctcggtgatgcgcaggtcccagtccagaaggaagaggagctggcgttccatgaggttgacctcagggagagagaagccgaaaccttcgaatcccttcactgcagtgtaacgggcccaatgcttgttcttgggactggagtcgttcagatttttggcggccaggatgagcgaggcgaggaagatgcgatggacagtgcaacgcatgccctttgcgactggtggcagacgtgatcgaagacgaccgaggtagacgagacagctcatgagagtgggcacctgcacctgcgaccgagcaacaagtgacgcgataaaggtatcgatcgggggaagagcaggcaggtcagaggggtccattggaggggtggatggtggtgtaggttggccattctggttgaccgtgttggtcacatgcgcctcacagcggatgacctgggctgcctgttgagccaggtgtgtgatcatttcgcgagtcactcggacagtgacaaactcattgagagcagctcggttgagtgatgctgagtccatcttgatagagggatatgacaagaagttggatatcggagaagagatcgaggatgggagttaaatatgcggaactgagatcaaaaaggtgatcaaggccacagatagattgtctcgggacaatccaattcagaaatctttgggcaaacgacaaaggtctttgtatgttggcggtatcagagggagtcgacacagggtgaagcaaagaaatccgatcaaagaccaagagacacaatggcgaacagagaaagtgaattcctggccggcaggataactttcagatcaagtactttctttaaaaaaagaatgttgcagtaaggatgggatagttggggttgtcgtgtcaacgcctatcgatagccctaactgagaacttctccaaagtgaaacccgaaatttattcgagagagacacaatccacagttcactgcaagtaagcaatagattggaaataatgtctctgaggggggaaattcaggatagaaaaggcgaaggatcaaaataaaaggcaggtatcaaaggaaaggatgacgacgttgggcatgatgaatctcgtgaagaatctgggtggaatgcctctctagttatagtatctggtatgcgccagagtgggaggagagaggggatacggttctcccctgcaaggaacggccatccagttagaagagagaagatagccaacagggatagaacagagccaacctgcatagttggatctaagatgctacctatttttttggcgcgcggagtctgacagggaaagtgagctgatttgtcgagagagaacggatgatgtacagttgatagactattattgtacctgtgcgttattatccctagattcatccaatagagggttggacggttggtttttggctgttggattgcatcgactggctggacacgatggactcggtgtgatagtattctacattctacatgaaactaaaataaggggcgtattgggacagggcgacgtccaacaatacagctgatctaggatctagaatatgggcccttcacaatgattcctatgaaacgcatgaccgtctcagatctactccgtatgggtcattccattccataccaaaataggatctattatctagtcaatcatcaccaagaacagacttcagctgaaaaaaacacggtggcgatttcaggttggcgccgtgaactcgcgttagtgcccaatcactcgaaacctgtcagtttccgatctgatcgccggaatccctgtgaaatggtccctttgacagacttggctgtcctgtcatttgactggatcccaatccaacggcgcgaatatagcgtgttcgagggggagacatgccactcctggaggggaaaaagaaaataaaacgatcccaacctgttggaattatccgacatccacctcacatgaggcaggtcacatcattccggacccttttttcttttttcctcttggatctatcgatttccaacctcttcccaaccacccggctatcttttgcctctccccgaccatgcagtagagccgtgggatgcatgcaatgttccgtgcatagctcttttagcgtgttggctactctaaaaaaaaaggcagcacactgcatatgcatctacataagcgcccatcctctttccactcccgacttcccgcccagcgcttacaatcccaacatcgtggaagcgctatgacgtttagctctaattttatcattttctttcgttattcttagatttgtttctatacgcactacgctcctgcttttcactaccccggacgtccccatgcgcgggccgtcacccgccgttccgcctgtcccgaatttgggatgctggaagtgatactgcgcctcatttcatcgggcgtctcgctgttggtgatttggatggttggttaagagtgctctatgcaggtttccaacgtttgttcccacgggtgctcccacgatcccgcaggtgatcccaaaggtgatccgcatatccagcccaggctccatcattttatggcgccgttggggttctcagagctttgggcccggtgttggaatggggcggtttcgggattggagggtttgtttcagtgttgggtggcggctagaaatcgtatgggtgagatgcaacgcgaagaatgcgaccgtgcatatgcggagtacgagtcgcaggctgatactaatgtgtgtatttggcattatgacaatggtggttctatgattggcagtgattatcgatccggtacttggtaaattgtgattgattacatttcccaactatcttcccaagtcccagtcatgcccttcgctaaaaccatggaatcacttgacaattaaacaacagcgaccgagtaagaagaaacagtcaacttagcagtaccagtgaaaggctcagtgccagcctgcacatcaatcaagtatttgctgttgctcagaccctggtcgttgacaaggtacgtaaagaacttcaacaggtcaccggagaagctcgtaacggtcgacttggcgacgaagctgtaaacagtcatctggccattgggaccaacccacacatcccattcgacaccattgatagtaaccgtcgcgatggccttgccagtgctcgagatcgggcccgcaccgcccagagccgcaagccacaccatgatctcgtactcctcgctgccatcagcagtagaactgagaaacatgtcgtaagcgacatcggcgacgatatcggtagtcgagtagctattcagagatggttagggctgttcgttctaaagaaaccatgtgcaccaggcttacctccagtcccaaacggactcgatgctgctaatagcactcagcgtcttaggagtgaactgcagcgaggcactggcgtagctcttgacctggttcgtggcaccggcccacgaccacgaggtgtgccacgcgatcttactgccgctgctcgagtctagccctgtgcactgcgtgccggaggggtcttgggcttcgttccagaggttgttgtagaggatgtaggtgtccgttgtggttgtgccccactgatcgcagaagtctgcgcgacgagcgatggccttgactggggccctggcggcgttgcccatggccgacagtcccaggcagaggagggacacgggtgcgatgaaggacttcatagtggctttgggatcgggtgttggtctcagggacagatgggagtatcttggtatgaaattggagtctcacaggatggaactggggttggagggttgttttatacatgccatattctctcgggaggcgtccgtttggggaatgacctgcaccggcggtggattcatgttccgtatagagtgcggaggactcctgtctcacatttcatattggtacgagttattatctccgtcgagctcatggccgggactccacaacagccggataatatcaaaagcttgctcggggccacggccagccgggattgaaggaatatattgctgctgccatgacgtgcatcgtggacaaatttttccacgactcgaggtttattatgcagggcattatctactcatctgcggattcggaaagctctccggtcgttggcaccgtacgtgaggccgtcgcagagcggggcggaggattactgcttctagaacgcggtcaaatcggaggccgttgcttaaaaggtatccgctttgttcgagattcccctgaagcataaattgtcggtttgcatttgcgaagtttttccgtggtgtgactggctttgtgcaggagccaggtcagtgtaattgatttgcgtgtcatatgtgatggtcaaatctagagacttgaaggatacatatgctgtatgtactcacgaatcagctacatcgtcacttacgcctgttcttcatgcaccccgcaaacaacacaacataagactccccagaaaatggatggtagctaactccaaaggtctcggctgaggacttgctcctagtcagagattgcgggatgccgaccgtttttcaatgggagatgatcgacattttgaccgttgaattcaagtcatgcagaaaccaaattagaatggttcttgccatcattcgacaggggatggtttcatggcaagccacgtagctcaagtatggatgttacacattcgtacgcgctcacagtcaggcactataaggtatgttctgtctagcagtcccctgcatcttcggaaattgaaaatgggccgattgggacgaggactcagacggagaggcaattgtggctaccgtcatgagcaagtcagaaaacccgaaactcatggctgtttatcttacacggtgcaatcattttgcttgcgacttttcctttcagctatgtcgtggtcatataggcaagggtcggtccgtcagcatagcgcaggtcctcgtcattttggatatcatcccaagtcaactttagataattagcttctctgatatcacacaaacaattcaagcttggattcgatacattcatcgatatacggtggactctagtcgagattagatatgtatgttgtacaatgttcagaatatatatatcgtctcaatccaggtcaaacctcgggatacccatctcccatctctttatactgatagaaacagtcaaactagccatgtgtcctagcatcgacagtccgtcatatgcaagcataccaagttcaatgtttaagaatctgagcaacaggatgacctcggggagtagtttgatatatcttggcatcgggttccgcggactgcggcagttcccgcatacggatcacggcgatccgaggtgagctgtcattggagatgattggactgtcctacctgacaggtgcagacgtacggaacatcgtcggggaaaggagatatcgaggacgcttggccaatagaagagacgataattcggattgtgggcatccggcatggcctgttgatgtaaaacaaacagtgcaaacacatacaaacatatacaaacacattcaaacactacaaaccataggattgcaatatcaccagcatataggtgcatgtattgacttaagcatgagacaatgagcaaggaattgactgatatacagtagtaatgaatcgaacaaaagcgagggcgttttgactattttcaattgttttgcttatatgccccactaagtggaactccggggatttcgctagggggtggaattaaatttaagtgctcgcatgcctcttttttcaaagactccaggtcccttccccaattcccaagatgccttctaaatcctcaaagtcttccagctccggctgccgctgtcgctgcttctccctgaagagcctcagctacctggctatcttcctggctctattctccgccgtctaccgataccttgatgcgcgcctggagcaattctacatcttcgacccggtgcacctacacgatgtatctcagcgcgctatcagcgcccacggcgaagacacccgctctgtcgtcaactttatcgtcgccgagctggagcaaaaagtcggtcccaactacctaagcacccaggaggagtgggttttcaacaacgccggcggcgccatgggcgctatgtacgtgattcatgctagtatcacagagtacctaatcatcttcggtgagtttcgcgcccgcgatcaagtctactgcattccttttcccttctaatcgcattcaatcttcgcaggcaccgctatcggaaccgaaggccacaccggccgccacaccgccgacgactacttccacatccttcagggcacccagctcgcctactcccccggagagttcaagccggaggtctacccggccggcagtgtgcaccacctagtccgcggcgaggtcaagcagtacaagatggatgaatcttgcttcgcgctcgagtacgcccgtggctggatcccccccatgctcttcttcggttacgccgataccttctccagcaccctggacttcccgacgttatgggctaccacgcgcatcacagcccgagagatggtcggcaacttgttacagttgaagctataattgagcatatgattttattattggcatgcagggttcagttggattgatgaggtctatgtggaatgtatgatatgggaattggggtgcgatcctagcacctgaggtgctattttggtaaaagttagtagatatagtggatattcaattgctagcaccgagcacatttttaataacatcatcagctgactgcccttatgacacaggctattagacttgagctgtgacctaggacgctttgcccaggctgctgccgttgaaaagatgttggaagtatggaagccaatattccaacgtcgtactaatcatcagtagacggtgagagacctgatgtcttaatcatttgagaagatccccaagtcctgaagttcagtactacttccaacgacggttcactagagctacggaggccgtgatcgaggtcgaagatataccgaggacgagaatggaaataacagaagaaggctgagataagcctttataccttgtttgtcaggcttccacaggcttgggccttagttaacagccaaaaacgtatctttgttaggaaccctgcacgaacaagcctatcatgagcgttgacatttgcctaggctactaatatgcatgaatccgcatactcgtatgccacgtcacagagagcactcagccgatgtgtgcgtgtgttgctagcttccaagtgttccatcgaaactacgctgaccattcccatttctctcactgatgcaatcttctaacatctgttactaggccatatgctcatggttgctcgagcaaaatgataccctcgaaggaatttcatcaagcagttcaaaacctacgcggactaacggatcaaccatccgaagaacactcttatcgaatagaaattccaccttctcaatcagctaagcacttgctaaaagctgaggatgagatgcaacttgccgatgatattgccttcctaggtcaggcagaagagggagccaaaaatgtgacggctgtgactctccaggagaaagcacctgggcttgtcatttgcctcgcgagcaaccacacgccatccgataaaagagttctggaattgaataaaaccatggctttggtgagcgagtacgcttctgaaggtagctccttgtatgcaaatgtcatattcagggttgctgacttgtacaggaaagcgacggcgtgaatttcgtgacaaaatattcgacatggttgttgacatccgcgaagatcgaattcttagcagaattcgtccgccatggttaccacagcctagccgctattacaaactgaggccgtttctactctcacaggttcaggtatttgttgatgagatttccgttatcaatcgtcagtcagcaggttttcaatctctggtgcaaccggcgcgccagctgatatcctgccttttacctttcaaaaaacctgttccacagattttgagaaaggaatatcagaaaaatgtgataaaaagctgtgctgaattggctggtgttggtgggacaggattgctggaggaacaccttcagcggctacaaatttcagctcaactccgtgatagaggtggaatacgtcaaattgacaagcttgcgcgatacttctttgtgtgtcgagatcttgtcagagtcggtagacgtccagagtacaagcccctgttcagcaatattgcgattgaaaccttgaaagcttccaaaggaaggccagtaggctccaaagtgtgctttgttcacgcagagatgcagcagattgttcactacacgaatcatcctcatgatcctagtccgcggtttatcggatgtagcaagtccgcatgctacctctgcgatatgttcatccagaagcatgggttataccgaatctcacatgctcaccggcggctttatgacctatggacactgcctgatttggattattcggcttccaaagaggctcaacagcttcaagtcatattaaaatccatgaccaaggagatttcagccattgccacagggtttcaacgaagtcctcgtcctccgaagcagtatagagcggagagcattgcattcttacctcttaccagtggctcgacagcgagcaatacttcagttgccacgcagaaagcttccatgtcttcagtatcccccctattgagtcttaagtcggactctgataccaggattgcgagcacctgcttttcgaagagcctgtctagcagaactagcaatgcgtcttgtcttttactcaaccaagatgacctgccatattcacttgatataaaagacatcaaacacgactttttggtgcagatcggtgcaatctttcttgatgtcgagtttgttaccactggccggctctcaatccgccacgcaatagataatacactacctaaagatgtcatagatatctctcatttatctacaattagtgagacaaaggtggctcaaagtctaaccacgcaactatccttgcgtcaccctagcggttttacgataattattgactttgtccgggatgaggttggacttgatcacgaaacagtcattcctgtgcgtccggatgactaggtctattgaaggttacaattcggaatactgtctatatagcctgctagtaacaataacatggtgaacctctatcatgattggttacaacgagtctaaatcagcctttcctcggccatgaatcgcttgcaaatccaagctactcactcatctccccaagaagatcctgcgcattatgaagcaagattcgtctcgttgtctctgatccaaagacactctgcaatccatcatccactctcttagccagagactcagccaacgctgcaggggtataggggtaatcactcccatacagcaatctagacgaatcaaccagccgcagaagaccatgaatctgatccgggaatggcacacccgcaagatcaaaatagaaacgcgtccgtaacagctgcttaatcctctccccactaatcccatcccctggaccgggaaccatggacgagaactctgcgatcctttccattatcggaggaaaagtcgcaccgcagtggcaagacacaaatgtaattccaggacagcggtcaacggtcccagaggtaagcagactcatgagtgccctggtcgaatcgaacataaactccataataggcgccgagaccccagggagcggtatctccttctccagggagtcatcatcgtgccggataaaacatgtagttgggtgaaagaaggcgatggtctttcgcgcactcaatttgtcaaaaacccgggtaaagcgctgatcacccgggtagatgccatgcgaattggtcagaatctgaaaccccactgcgccaagatggtccagtgcatagtctatttctgcaagggagccttccacgtctgggagggggagagaggcgaagaagaggaagtgggttgggtgatcggcgcagattttggacatgtcgatgttggcccgtcgggttacagatcggccttcttcgtcatttcctggggttaaatgtgttgctggagaggacatgctcagcactgatttcttgatttttagctggttcattagttcaatgtgtgcttcgggactccattcctgaattcttgtatttagtgtgaaagttagatggttgttcccgttcaggcactcactgggatcgccggcattccatctgggtgacctctgcccgcgaagtcgctctgtaggcaatactcgcgataagagggtggtacgcagtgggtgtggatatcgattttctccattttcgatctggtgagtgtatagggagtattttctgggggattgttgctgagttcatgtatgcctgccactgagatcgacatgcctagttcgtattcttcaccggttgttcaaacagtcacttattggttactgactcgaggcaacgacaaggaagcatgtcgtgtgaccatctccttcttattgccaatgctgtggaacaatgaaaccaacagcctggtttggcaaactgtatatctttagaccgaaacgaggtctagactaatgactatatcaggtctactttcggcagttccttcggtacgacaatcaatcccctggcagccaacagccgggcctgggtgagcttcaggaaccgatacgtgttatccaagatcggcgtgtgaacacccttctccctcgccacacgcaaagcattccccagaatgacctccacctccatgggatttcccttatccacgtccactagcatactaggccggaaacacaactcgagaggagtagcatcaaccatctcatccacaatccccgggccaaggtcatacccatccgccttcgcaatggccgccatctccgccataccgggtcttatcaaactatactcgccgccgaatagccggactgcagcactgtcaagctgagtgagagcgcacatgggattgaaaatcccattccaaagcaccttgcgccagcgatagaagacgatgtcatcgacaacattcgcatcgacgactttgctgctgttataaatcgtcgcaaactcttcgagcttggcgcgctcaaacgccgcgtccacggatgggttgcggaatgcgccaatgtggaatttgtcgtggtcgtcgtgtaccacatgcccgttgtgttcatgtgcgccgatgaaactcggcgctgacaacaccacgttctcggggaatgctgcgatgatcggtggttcgatatacagaccgttttggaataggacgatcgttgtatgacctggagttatggctggagctatgatcttgggggtgttgttcacttcggggatgttcttcatcgtgacgatcacatagtcgaatggggcgttgggatcacccaagggaaccgcgttgacgactatctatgtgttagcttcgactggaccgggcaagctatttctcgcctcgcgactttgcgaggatacatacttgcgcttggtctccaggctgatagttttccgtggtcgatagactcgatttcgaatccatgcttgacgacttgttcatagttggaacgaagaacagacgtgacagatgcctgaccggatctttcgagggcgacgctgaccatcgtccccacaccacctgatccaatcaccaacactcggcgctttgccgtggtagtatcggacatgtttgatgattactcttgaggagacagtgtcgagaatttccagtcgatctgctacagagttaagataaaatgggacatttctccaaatacaacaccccaccgaggccgatttatgcaatgcgggaggccgatctcggggcatttgattatctcggcatctcctgatcttatcgacattctaccgctcactggatgacaaggccgagctcccttcatggcccgatttggttattctgtgacatttgaaatgagggataaactatacaagctaatgttccaccatggaacgcgcaaaccatattcgcagcaactgatcggatgataaaaagtgatgtgaaatgtcgaatctttcaaaccaccgccaattatcttccatgtatccccaaagcaacccgagatgaagaacctagtcaagcaaatccgattccccgcgctcgaggacatcctcagcttcgcacaaaatgtcgcagaaacctcgggccgatgggtcaactggcagatcatacggggcatgcgacatgtatggtgggagacggactgggacgtgctatcccgatgggcgcaatcgatcatcgaaacagaagagcgcctgcgcgaaatcacccaacgcgagacgttcgtcaagaagaatatccatagattccacaacggctccgacgaagcagccaaattggttctgccggatttcatcgaagagctgatcgctctggaccacgagtacacgcgcctcgagcggatatacgataccctcctagcgggctgtcccgtgggccctatcaagagcggatatctgtggattcgaaagcagccgcagtggcatctcaggaatgagtggttgcgccaggattgtgcgaggcgcggtgggtgctgtggtcgtcagtgcaaatgttgtgagaaaccgcccgatccgatgaggaagaagggctggggtcattgtacggcgaagtgtgcttgttgtaatgatgtgcttgaggacggatttcgactgaccgagagaaatcggagaacattgcagccggagtttgatcttactgtttacccgtggagtgattatagtcgagagatgtttcgtgcttatatctggtcgcttgaataggctttctaatagtttgctttgaaagggtgttgcttgaatgtccgttgctctgtataatcaaatgccgctttcctcttatcaatgtcctagaatagaactagcattttgcaggggttcgagacttagcttgaaacaaaagtcgaagataccatacctagagttgcaggtccatgcgaatcaaagataatcaaatgatcagcggggaagcttcctaaaatctcgccaagccggcatgtttaacgcatcctgattcgaccgagtagttaatatcagagccacttggagagtacactgggagtttccccgcagatgatattcacacttgataaggcggatctgcgtaagtgtaaggcactgattgcttaaataggcaggatcaccttgcccatcatgctcgctcaagtatcctttcctacagtatccaactctcaactatggagagtgacagtattcaggatgagaccatttgggctccaggaacagtcaggctagaagatagtaagtgaccgccaaccataccgatacaacttgacttacagagccagtccaccaatccagagaccaactggtactattccccacgccatcagccgaccccaacgatcctcttaattggtcgacagctcgcaaagccctcaacttcaccctagtaagcttctttgtgctatggacttttgtccaactcgatatcggcttcacagcatggggcccaatgcaagacgagctcaacttctcagtcgatctactaaacgccaacgcagcggtcaattacggcggtcttgctataggctgcatattctttatacccctggtccacaagtacggccgacgcccaatctacatattcagcgtggccttacaactcgcatcatccatctggcaagccgagatgtacacgatcggcgatctaatgggtagcggcctgatatccggcatcggcggcgcaatcagcgagatcgttgtgcagattaccatcgcggacatgttcttcgtgcaccagcacgccactatgaacggctggtatgtcgtcgtccagtgtgcaggagcattccttggccccgtggcatcggggtacatcgtggtggcacaagggtggaggtggatgtggtggtggtgtgtcattttcttcggtgtcacactcctctgtgtggtattccttttcgaggaatcgaaatatgtcccttatttggatggtcgggagtttaccgcggatgtacaagtgaccgatgaaccgtccaaatcacgcaaagatagggacgcagcagatgcaaagagcgccaatgagacgatcgctagccccgtacataccaacccggatattccgatgaagacgtattttcagcggatggctttggtgaccatcaccaacgaagctctgtggccgcatttttatcaaccaatcgtggcgctctttaccttcccggccgtttcatatgcagctatcacatacggatctatgctgagctggttcgcgatcatgacttccttacaggcatcgtacatgatcataccgccttataacttcgatgccattggcgttgggctgatgaatgtggctccatttgttggcgctcttctaggtttcccctttggtggacatttaagcgataaatctattttatggttatccaaacgcaatggcggtatttacgaaccggagatgcgtctttggcttgctctacctcttgccattattggccccgcggggatactaatgttcggtttgggccttgcctatgtgagtatatccaaagcatgccgtttgaacattctaacgttatctagggtgtgcactgggctcttcttgccgtgggatttggattctttggatttacacttgcttcaattagcggtatcaccctctcgtatctcatggattgctatcaagacgtgagtactgatcttatttcgagcgtttgggtcctcttctaatttgagcgcttctagatcattagcgacgcattagtcggagtgatttttatgcgaaatatcttctcggtggttgtactctttgctttgacaccttgggtcgaagggatgggcttgcgagacttgcatattctgcttgcagttattgcattggtggtcctgttgattcctgttccacttcttgtctggggtaagaaggctagaattgctacggccgcgagttataggaaaatggcggcaaatcagctcagccaccggactacttagataccctcctactactagaataaattgcgactcggctttcagttgaaggagacgaccttgacaaatattaagtaatgttataatttagacaagcccataaaaataagactaaaggtgtataatgttaatgaaggtatcacaaagaagaatgtaaacgagtgtttcaatgtgttcctgtttcgcctgactcccccaccctatgcaatccgcatagagccttccatccagcgaaggagtcccagacctagacgctttccctcggcttctcatccttgtagtcttcatatcgaggcatctcaaatgtttgccgaaccgcataggagacactttgcttatggttggaagtgatagtgcctccaggattgctcgagaccacaagagtcctgtcggacagctcggatacgttgttggaggcacgaatttgagaccagaagttgcgatgactcaacttgaacaaagggcggaggttggggagacaagcagccgtgattccgactgctgcttcgatacaggtccacacgatgacgggaacttggttatctgaacatgtggttagagatatggatcgagagattgaaagaatattggcacggtcgatactcacaggtaatatcaggacctagctcaaccagtcggatcatggcattgaggcggaagatatcgaaaatcaaggttctagacatgaattgttagtattctttcactgtagcgcgaatgggatatcaaacatacaagccaccgacgaggaatactccagagagaagcgctttctggccgtttgagatcggtaatgtccacacgactctcatgggcatgatcaagagaatgatgtcggagaggatgttggggatttggattccatagtagaattttgctgggtcaaggcaggctccttcaaccgactggtcccagaaccttttgacggggatacacagaagagcacctgcaacgtaaacacccacaacccagagagtgacgaatccaaacatgatgttcactgcaattgtcatgtgtcggactgcaaagagtcgcctgtacagtgccagaatggagtatttaatgaaggcgatgcagccggtgtagataaaggcattggcaaagccgagctatcttgagtcaatgcgtgtacttgatagtaatagggctgagttacgtacttggaagtaaaccacgaggtttttcgctgggatcattgtgatgtgtgaccccattccattgaacaggactaatatggtattagtatacgttggtttaatggggattttgattcactcacgaacgacgactccactggagcatgcatatttaaagaacagagcaaccataatcaagtagtcgtccatgaaaagcctactcccagtcaccttcctcgccaggatcctgagagcaacggagagagtcgacaacgtgtaagcaaacaccagggcaataatcatcgaccggcgtaactcctggttcgggtgttcgaagtctcctggtgtccacgtggggctggaggaatctggggaagacatgacaggcaggtatggtggatcaactcaaacaacaaggtaagattaaacgagaggaagttgttggcttgaatgatttggaatcatttaaggctgcgtttcggttcctttaatatacttcgacaagatgaggaaggggaaaagggatctacgtatgtagcctggatatgtcatatcttttgacatccacgaaaataccgcaaagatgatatgaagggtataccgatcacatcgatgacagggtatttgctaggtacggaaggcagttcagctcaggcaccctccaatgcgaacgactactgattgtagtgtgcgactattttgccttagaaaaagctagccgatgttaatcaacggcccgtcggatcataaagcaacaaagcattgtataccttggccgtggagatttcaccaatcatatggaggccaaagaaccctttccggacgtatcatcttggaagagtggatatatcagattcggatctgacactcatgagatccactttatgcaagttatttttttccgaaagcccggcgaatagatgtgttgaacaaaatgacagcatgttctagcgcattacgtctttgatcgagataatcactagagatatgcgtgaagaatgattgttcattgctttgcagtcaagttctcatactagaagattactcaacgaagttcggaattcatcactatatttcaagcaagggattaacaataaagaagtctacgcagttttgagatatagataaaccggggctgagtttcccagggctctatcgtaggagaattcagaaatagagacatacacggaatatctggctttctccatatgtaccacgcccaatgtagccaaaaacgccgaaaccgccatgatcgtccaataattgaaaacaatgcgggttgggccatagaatacagatttgaagccaccgttttggcagatccacgtataatgagacagttgaggtctggggttgacccgatatgatatgtctaaagcacagcagacatatccgattgcggcccacatggtggcatttagtggaattcagccgttatgttggtccacatgacagcgcttttgccattgattacgaagttgatatacgtctcatgcagctattgcactgccgttgcacttcgattgcacatctgtacccgcttttcctggactgtcgcacatgaatacgatgttaaatgcgatctcaattggaatttaatacgttgttcatgcacagttttgtgcaacatatgttgtacagcctgattgtcgatggaagatgttatgaatccactttttactccgcacagatatccccgatcttcgcgaggggctgtatcggagattagcccgatcgaacgtccgactcttcacagagctgagagcatgtcattggaaggtccacatgggtatattacgtcttcatagtttatgttcacccttgccgttctgtggctcaatgtcctcgacaaagttcgacggaaagtctaacatcccggatttgcaatgcctcaaatttatatatactttgatcgtcccggctgactctaggaagcaggtataatccaaaacagttagcatattccaagctatccacactacgagcaaggcacatacccatagtaacacgtagggccattccattgaacagcacacgagggaaagtcgcacacatatttgtagctgccgtggtccagattctgacctgcagctttattatccgcaagggtgacgacactatcaatgtttcagagccgcaatgtgtctttccagggttgcacctttccatgactcgggaagatccctgtcccacaaccctttctagtggtatcattggatgctgaggcaatgtttgctgcgtctggctccactacggggctacggtaaagtgattacccttccggtccaattgttgacgccgatagcaatcgacttgggcatggacccttccaataaacagacgcgatgctttagatgcacgccatcgacgattagcgtcaagccgcaggatcgatcgaagaaatgcccctcaccagaaatattccatctccgaagctctcccactaaaatatcgttattctagtacaaatcctacgcgatcatggccaaagtcgctcttattaccggcggtagtatgtagctttctatcctcggatcattcattcactaagtttattgaaaaaagctagcggaatggggcttgcagttgccaaggacctgagccagaccggcagctggcaggtcaacattatcggcaccaaccaggagcgaggccaagaagcagcagcttccttgttaaatgtcacattctaccaagccgacgtgcgcaattaccaacaactagccgctgtatttgaccagatcttcaatgccactgaccgaatagactttgtcttcgcgaacgccggaagagcagattataccgatttcttcgctaaatccgagaccggcatcccgcccgaaccgggttctgaacttgtcgatgtcaacgtgaacggcgctctatataccagttaccttgcgatgcactatttccgtcgctctccagagttaacgaaagggcataggaatttaatactcatgtcgagtatcgggggactgtacccctgcatgttgaccccggtgtactctagcactaaacgtatgttgagaattaacaactcgaataagttcgccatcagacatggctaataagttcctagatgcgctcattgggctcactcgctctgtcggagagcgactttgggaagatggaattcgggttaatgctctgtgtcccggggtggtggaaacgccccttcttgccaacgaggcgtttaatgcgatcttcccgcgggaaatactcattcctatagacgttgtaactggtgtggtatcagagctactgtctggggcagatatggtagacgccaaagggatgcgtgtcgctggtgatgaaatgcattcccgggcgcttcatgtttcaggaaagagcttccttttcattgagaagcccgagtttcatgatgcgcagtctcggataacttgggctgcaatgatggggcataaataattggaagcataaatgtacgagacccaatgaactcgagataaggtcccaagactgtatgtcgccgttttaacatttgatcgctctatatcctgcctatctggttccacagaattcacgttcaacactcggaatgttgaaacacctgatgcacatgtttaaactcaatttccttgcaaatccctggcaggtagaagatcccccatgccataagaacaactgccgtctgatagtagtcaaatgcataactgggccactcattgactgccaaaaatccatcggatcccatcccaagctgtgtcagtcgcatcaaattgcgaccaatagcaataatcgagattgcaagaccaaacaactgattataaagtttccaatgaggcatcatgagttggatattggcgaacgagggtcgtccaaatcgaacagtccagaatatattctccacaagagtgaatatccaaaaaaccatctggcatacataactcgccgtgagaatattcgctgcagactcaatgagtgtagccttatgggtcagagcaagaatcatagcaccggtgccctgaagtagaaaaaggacaatgttggaagcgaggtagatagggagtcgtaattgggtagggagcagacccagattctcggacttcaaacagcgcatcattttcacttgtgtgagattgacggtaaacatgcatagcgttggtccaaggaggagaaacagattttgaacgccgtaggctccaaagctataggcatcttctgaggagaacactcgagcccctagacccattgcttgcactatggagtggtgagcgggagaatatctcaatcgggctgggttgttccttacccagagctgctaccagcatatagctaccatcccatgctcgagagcgacacatacggaccgcatgcgttgcaaacagggcgcaatatatacccactccaacaaccgcaggaatcagacttggcgtataggaataataggcggttgaagacatcatattaggaaggatatatcaaacaaagaccaattggctcttgaagatgtaagtaagttgtaatgaaagcgagcatcactgaaaaatccggaacccccatggcatttataacattggaccccgagtaggggaccaccaactcgatgcagatcagatctaaaccgagtaatcataacatagctctttatggcagcctaggggcccttgtgaaagattatttctacgacgtgcaatgtctcggcgaagggtcgggttcgtactcgggttcggaaaggaaaggttaatctaccttatttcctggcatttctcaaggcaggtacattatagttggggctaatctattctcaattgtgaaggcaccaatcaaacctatcctttttgctactcttttctaaaagaggactacccagtatgttagcgtctcaaattagtgacatactcattcttcagtaatattgaagatcaagctgtttaggcatgagatgatcacctccttccaattaaaatatactataagacaataattaagacacgctcctgtcgtgcagcgaagaaaaaaattgagatcaatctcagcagttcaaatcatccgccatgcgcctccaaacagatttaggcagcctcccatgaatccaataaccaccatcattcccatcctgaccccgccctttccacgtcacaaccaaatcatccaagtgagtcttggtctgtcgcagaagtccgcagtagtcaacacttccctgtacaaagagcggacactcgccttcgatatcgagaccatagagcggcaggcttttccaagaagcgatgcgtggttgagccgcgcggctgccgtatgattttgggaccatgggtcttttcgtcgggtttttgtgctgagcgattatctctgcgatgcattctgattgctgcccttcgtgaaccgcacgccgaatgtgtgttgccagtcgaaccaatgaaggagagtcatattcgcttgttggtattggatccggcaggggcatcatgtaccaggggttggaaagatttgcctctgactggagttgttttgagatatcgatggttaagccgaagttgtgggcagtgtgtaagtgtaaagaagcctgtgcaggtattgtcttagtgaacttctccaatttggggcaaactgtatgacaggtagcatcactaaccttgtagataaaagccagcaagagatcatgttcagttaccttggcctgtttactttcggccgcttcaatccatctctggatttgccctcgggggaccaacaaggtcttgccgatccgtctcgctgaggggtagcatatatttcgcccaatctgtttcccgagggccgtaattcctgctatccaagtccgattcatggaatatttgtgcagatctgcgatccgatgacactcaatcttctccacgcatttttcgattacttctgttttcagcggcaagagtggtcgggcatggagactgtgggtaattttttctcccctgagcaggctacaataagcctgaactatttgatgagcacctataagcacctgtcagctctactggtttgtgctttatgctttctaaggcgtcaattaccatttgcatcgcaaagaggctgcaggaacttgaatcttattatgcaggcatcggtcaagaacaccgttcgtatggagaatacgcgctgcctccatgcatgcaagactccatacccaaaatctaacgccttatcgaatgcctcggagtcaatcaattgcggtgagtccggcttgggggaaacttggagaatctcgctgagctcttgcttaagaattttccctttccacacttcggctaggtcaccggggtctttcggatccaagaatttcgttttctgtttagtgttagtatgattaacgaccgtggttgacgttaccaagcacgtaccagcggatccattcgcaagttcagtacaggccattgtgacacgagtgtatcggcggcgaactgaaagtcgagcgggctaggactggtcctcacaacgattgacagagtgaactcgagaggtcgggcatagcccatatccagtggacttggcttcataatgaaatttacaaaaaaataacaaaataacacgagatccagtaaccatgcttatcaagccgacccaaaggttatattaataataaatagagacagagtgaggccgtcacggaaatcaacatgtcagtatctgcatattgatctgttgaccccaactttaacgtctctccccacataattgccctctggaatgccaccctgtggatctcctccaatgagcttcctgacatggaattctgcaccatggtagagacctctctggaatgttgtatgtccccacacagacctgcgtgtcgctcacaattgcccaaacttagcagcagtcttgttagaggagattggaaatgcgcgggcaggttgtccaccaatcgtagtcgaaggttgcagaaatattgactcctgtcattccctatacgaattccagctaatatcaagtatgatgttggttgtgatgaatcgattgtctgatactatcccgtgatgatggataccgggatcagccgagccactagccggccgttacatttttttacaaagttacagaccattttagtgtgtaacctttgtaataaatgtaacaaaccggttaaatcgtgactagcgtacggcggtcgaaaccgactctcctggcaacttcgaacatgcttgaaagttgacacctttggcacctctgaatggcttctctatctctgcctccacctggttttgacgtcggtattgaccggttttccagccttcctgtcgagcttctcatttgcatttcctcttacttgaccaatcgcgatctcaagtctctacgcttggcatgtagactcttggctcaagtcgctcatatccgtgtgaatcgtgtttttctctccgccaacccatgcaacatcagagtcttccgcacaatcgcagacgacgaagagttccggcatcatgtcaccgagatcgtatgggatgatgctcgttttatcgagggcccaaagccgcatccccaccccacaggggagattgatgaggcagacatagaccctgaccaaggatgcccctactggtttgtcgcggcatgtaaagagaacatacatgaccgaaatgtgcggaagacctacgacatagtgcggccagatgacgtcgcacggggaaaacaagttattacgcaactatcgctgaaaagctgctggcaattttaccagaatttgctccagcagcagaaagacgttcttttctcaaacagcgatgtagacgcttttatctacggaatcgggcgattcccaaaattgaaacgaatcaccatcactcccgcagcgcacgggtggatccatgccccattatatgatacccctatgattaagtcctttccgtgtggatttaactacccgattccacggggatggccgacgtcgagagattcgcagattccgctacacgcccatccatggagagaagccactgaggaccggaagaaccaatggcgtgcattccgaaacgtggtatctgtgctcgcaaaaaataagctccatgtcccagaattggttcttgctgtcaatcagcttccgactgggcttaactgtactatctttgatcagccatgcgaggaatacgacaacctccttacaatacttcggagccctgggttttgtcgtctagatcttccacttcttgtgggtgggcaagagcacgaagactggctctcattccggagcggttatcttaagcacgctttgtccgaggcaaagaatatgaagtacttcagtcttagaacaacagttgacaccgatgccatacgtgacatctcgggcaatcccactcacttcatcccactaaagactatcctccctgtggaggagtggccagaactccattccttcagattatcgggtttcctagtgaagcagggtgacatgataaatttcctcgctggactgccgaagaccacatgtgttatcgaattgagtttccttgaattccttgatggttgctggcatggtctgctcactgaaatacgtgacacattatgttgggaccagcgagacaaggaatcaaggcccaaactcattattggtatagcggactcgatgcgcagggcaggatttggcatctggctcgacaacgaggtgcaagactttatttatggagatggaccgaatcctttttatcccaactatggcgactacctaggagcaggaagagtgggaacctgccgggatacatttgagccggggcgtccgcggcgtaatgtggatcgttttactatagctcggatggggtacttcatggcagagcccttcgctgacatgttgtagtatgtaactaactatagtctgctccatcgtaccttcgaacacatacacatcgttcggatccatatacaatgaacgtggcattgggaagaaactaactgataaaccgcttggtagaactatggatagaagaagttgtaaactgataggatttagactgtttctgccataagcagcagatgtgaccgcaatccgttcaacacaatctcgacctagaacttggtcctacgacatttgtgaaattgcgagaattgctaaggacaaggacaaattcttgactccccttgaacaccttgaaccttgagaacagaaccacttggcgaaatccagaaagcccagaaaacactaaagcactattgaccagccagcctctttcatacgtctcacgcgaaatttctcgcacgactcttttgtcgcgcgctttaggttctatatgactgatgaccaaccctctactcaatctctaccgtcaaccactattgagaccaaagcagcaaggtcctcgccaagggcctcgaaaccgaaaccccaaagggacagcagcggaggtggtgtgcggagaagtacgcggctgcaacaacgcgataaacaaaccaggcggtagttgggaacaggcccggttaacgatcgaggagacgactgcctgggactgcgactaggattctcctaatctccaccaaatggctcggtcgttcaagattattcgtactttgtttgcattctcgcaggagcggaccgttgggactgcaaagaggctaggcgttgaggagaatgagagatttttttttttgctgatcggtcgaagctttactctctgcgggtggctaagaagaaatatatggcctttttgctctgttattccggtagggaaagcctatagcgcacctagataagaggtttcaacatgaatgacacctgttgctaggagtgtagagcatagtaccgtgagcgacggaatcgttaataagtttgcttgttggaggcaaagattgacgagtgcttaatgacggaagttcatttgtgtcctttgcgaatcaaactgacggaggtatttggtgaaacttggaagtaaacaaaacgacataataaacaaaacaaacaatggcaagataacaaaacgcgaatcatatatgctcatacagaggcttcgaaacgtatatataaccatcaaacgttcccatcttgaggtagacctttctccgtcatcagcttattcagtgttgcggcatcaatccgctcatccatgtccgggtccagtagatcttgaacgatataactaagcgactcatcttgctgatctagctttagccgagcagccttgaccaggtcaatccactggagcatcgtatcgacagctttcatatggggtgactgatgtatgttcgtaatcaaccaatgcggtgttttctcaggcaagggaatgtggcctaatagccagagtatgacaatacccaaggcccacatgtcggatggcggtccacgtagcttccagtctagcaaaaactctggtggcagataccacggcgagccaccaccgggcgaaggattgccatcccagaagctgaggccgaaatcgatcaaaatggcaccccgatcagggctgtagaggatattgcctggcttaacatcgttgtgaacaattttattgccatggataaaagtaagtgccgaggccatatcagccaggatcttctgcgcatctgaggaatctccgatgaaaatgccactggcttgatgccgctgacaccagagtgattcggcttcgacgtgctcagtatatatactgtggaaccgggcgtcagatccgagcatgcgaagtatagccgactagtgagcagatcagttctgggaccaaatgaatggaacgaaagtacatacatgacttttgagagaagagtggatcgccgattcatgtatccaagattcagcagcccggattgcgtccctctcgtttctgccggtggttttgattactttgacaaccatgagcttgcctggcatacccgagtgctctgcctgccatacagacgaatttgcctgctctacaatagtcctgcatcgcgtgagccgatacccttcgtcgccagctccgacaaacatagtatcgccttttgcaagcttcacgagcgcgttcccggctgaaacagcctgcataccacgcgaaggctcaatcgctcggtatgtggattctctcgatttcaccctctttgacggtggaaagtcggatcctggcgcaggtcgtttagtggccgttttagcaattatctcccatgaagtccgcgggagtatctggaattcgacgagagttatgccattgatctcgatagcacaggaacctttgtataaaaaggcagggtctctcggcaaaactttcatagattccttatcaagccgcacgtcgagggtttcgaaaggacaggcattgtggagaatgagacgatcctcgcctggatccaagtacaagtgaaatctcatatcatgatgggtaacggtgcacccgacttgctcggcgttcggagccacaacgaggaccctggctgactcgcttttctctggacagtcacccagttggacttcgacccagttgtcatagcgcccggctcctttgtagggagatatatcgagctcaatgaccctgggatatagaataattctagctgtcggttcgttggacgtgatcgagtccagacgtagcatgctgaaatccaagtccatggattggtttcggcttgtttctagataaggataaggaggcgagaatgtctgggttggttctgtcaagctaggatgaactctcgttgagctagggccagcctctgtcgagatgggaccaaccgtcgatctaggatcaacttcagtcaaaggcaacgtagccacttcatcctctctgggctcctcagtgtcctcactttggcctgtctggccaagcttccgtttagacttggaattgagtgccattccgggaccgagaagctgctcgtaagcagagtatagaagtttgccatattattcgtattaccctctgatatatgtatgccgtgatttgcaacagaaccgaagcgccggcggagcgcccacggaaataaaccaggcacatatgcatgcacaatccaacttgccgctaggtatagtagaccgagattgagggcctatagactaaatatagccgtgcatggccatgtcagcactaagcttgagcgtcttagattggccgaagcccatggctgaggcgccaaactggtttcgagtataaatagaatgtcatttgattctgcaatgttaattcgatcgagtccaggcggtgagtacgttgttctccgcccttttagtgtggggcccctgggagggaatggggggcttgcccatatcataacataaatcagtaactatagcaagagatattatctttactacctcctccatggctaagcggtggcatcggacaatagacactcatctgggggctcatactcctcctgacccaaattattacgaaaaaacgtggtgctgggagtcctcgagagtcggctacaaggatcccaacgttctttttaccacactacatgaggaatacaacactctaaagtgcgcgattcaagacccggaggcttggcatcgcgacgtctcttgcattgcgagggcttcgaataacaacgatgaattcctaactctgcttaaacagcgacaagcagagaggtttcacgagatccagacaacctggcaaaagatcaaaacacggttaattacggatcctgcacgttgggacaacccgccaaccaaagctgttttatggagcaattttctacaatttgctcgaaatttttcatacgattgcctcgtcacctgctttggcgcctacgcgactgatgcccaaccctctgctcaacctctgctatcaaattccattgaggtccacccttccaaagtgcaaaagctcaaaagagaaccaaaagagaaaatggcagcatcctctggcgtgaccaagtcctcgccaaaagcctcgaaatcgagaccgaaatcgagaccgaaacgggacggcagcaggcaggacagtgtgcggagaagtactcggttacaacaacgcgctgaacaatccaagcgacagtgtgcaggacgcacctctcttgaggaaaaactgaacaaggctgaaagaagatttgcttcattgcagcctggaattgtggactaaggccactgttcccagggaatctctcccctcccattgcattgggtgatacatagtcctctctagtatgcccggtcttggctgctatgcatcggatatgcccagtaggatgggactggttcttttgtttctgccttggccattatatacgtttacactgtgtccattccaagcatgtgtactttgattactttgaactatcagacctgttggcgtaatgattctcttgacaaacagcacagattgactccgctaaatgaatttggttttataacaattcttggtttataggcatctaatgacatagatcaatgtgataagtggtgcagtcatctcgtaccagtctgatgatattaaggtaatcaggctactcggcgtaaaaataagatattctgacttcatttaagccgtttaaccctccagactggcaaagaccgaggatcgagataatatagatctaaccatggaacccacagacttagcgccctgtgcacggaccactcgatcgaccgcgggggaaaataaattcttctccgccaccaactcacaggcccaaccaattcatcatggcaccgacggcgtgtttcaactgcaaagaggcgcgagccgtcatcatccggcctaagaataggcacaaactctgccgtgcgtgtttcatcgatattttcgagaccgaggtacacgaaaccatcatcggcaccaatctcttcttccccggcgagcgagtagcgatcggggccagcggcggcaaagacagcacagtacttgcagcagtactaaaaaccctcaacgagcgatataactacgggctagacctatgcctactgtcaatcgacgagggcatccgtggttatcgcgatgacagtctcgagaccgtgaagcgcaacgccgtgcaatacgagatgccactcgatatccttggatacagcgaactctacggctggacgatggaccaggtcgtggaacaagtgggcaagaaggggaactgcacgtactgcggtgtgttccggcggcaggcgctcgaccgaggcgccgcccgcttgggcatcaagcacgttgtcacaggccataatgcggatgatgttgctgagactgttatgatgaatctcctgcgtggtgatctaccccgtctgtcgcgcggtactagtatcgtcaccagctccgacgcttcggatatcaagcgcagcaagcctctcaagtacgcttacgaaaaggagatcgtcctttacgcccaccaccgccagctcgactacttcactactgaatgtatctattcgccggaggcattccgcggcagtgctcgtaccctgatcaaggatcttgagaagattcgtcccagttcgatcctcgatatcgttaagagtggcgaggacatggccgcgcttgtgccggtggaagtccggggtgtgggcaaatccaagcagggtgaggaggaatcagctggtggatgtggtagtcaaaatggccgaaccagcggaggagagatggctgcaatggagaaggagctcgctgagaacgacacagccgagtcgctggagactgaaatcaagattcctaacggttcacgcgtgaaggcgaatcgcgggccgacgggtaaggcggtcaaggtgcagactatcaaacactgtgagcgctgtaactacatctctagtcagcggatttgcaaagcgtgcacgctgctagatggtctcaaccggaatcgacccaagactgcgatcgaagttggtgttggcatggaagacgaagaaagcagttctactttgatgagacaaatggagcgcgcccagctcagcgctacctgaagagtcactcagggaagcatgtttattcaaaccaaccttctgcaccagctttttcggggttctagggcatctccgccatgacccttttgctaggctgtcacctctgcaacacaatcacacccagtgtcaacatcaggtgtccattctcggtgccctaaacactgtgcggcaacccacatggttcgcaatgaacaagttttcaggtcaggaggatcattagataccccaagttacgactgaaacatccaaagtcaatgcataacatagagaaggttttaaaaaacaacaagttctgctacttggcaatgctctctattttattttatacatgaacaatagtatacaaatcccaaaaatcaacaacaacaacgccattccatggacacatacatcccagcgaaatcacactatcttcacaaactttcaaccaagcctagcacaactcgcctcttgcgtagcatcagaatgcagatcatgtccacaatcgacttgtcaccaacagaacaagctaaaccaaggcgaacccaggcaatccctccaaaactcaaccagactcacttctcctcaggaacatgcaagtcaggcaactcaaacccaacccgtctagccgtaagacgaatcttctcctcctcatccatagccgcaccagggttatagcgctcgacgagctcagagtagacgcgctgggcgcgggcatactgagcgagctggtctgcttcttggacgcggatgagccgttcctcgtctgttgttgggattgagaaggtgaggacattggatttcaattctggttggaatgaggataccgatggacttgagcggaagatcgcacgtagttgttggtggagtggggagggggttgagaggctgcggcgtgggagttcgcggaggagggcgcggtaggttgtgcgcattggtgttgtagacattttgagtgaggtttgtggtcggtttagtgggttttattaaagtgtatcaagactctggtgcaccggggtattggaggtgagtttggcttgggtcttgaagatgatcggatggatacataactagagaagacctcgggacaaattaagcattttcccgcctttttctgccgtctgctttaatccacgaacaatagggctttgagccactccctgcgttcttcatcattcctggcttcacggtccaagaacctcttcaccccctcgtctagctctctcctggatttttcataatctacatcgctaaccctaccatcccaatgcttgaaacagccagtgtcgtcaacgaatgcattcatgagttcaacaccttgggcccacagctcgccaccctgctcctgctgctggatttcttcgtccgagaactgtagcgggaatggcgttccaggagagctgccatcccgcccagcgccaataatatgtgcccattccttctcgacatctctcagcaggctgttgaggagcggctggtagtccattaaaactaatcccggaaccacaataacctgatgccggagagtattctggtcttgtatcgcttgaaagaccgtttcgttgagctgaagacaccgaactagatagagattgtgcagtgtctgtgctctatggagtgattttgccttccgctgttcatctagatccatagagtcaaaattcggtgggaaagcgaccttccccaaatcttcaggaactgggccgttgtaatcgagaaatgctgggcgcccaacctgcgtaaaaagcggacatgcgctaacggactgccagtcgataattcccacgatacggcttgggtctgccgggtcgacaaatatattctgagcatggagatcgccgtgccataaaaccgaggcgtgggtggctttgttttctgggagaacatgaggtgccaccttaaggtagttttgcaacgaggggagctttttggagaggctaggctggtattgtccgggtccagagaaaagaccttcgggcattaagggataccgaagacctgcctttgcagttgcaatttccctctgcgcaatagccatcataaatcctatgactgttgaccctaaattttgtgcatggataagcacaagatagtaacatcatacgagtcggagatgaacttacatggaccacgctcaatatccaactcgcctctcccgaagtcaaagaaagaacggtgattagtcggtccaatggtaaacgttttgcttcgcacttcgttcccagttgaatcaaggtataggggcgatgtagaatcggaattgtcaggaaggtcatctttatagtacaacgacccgaacttggagaattttgtagctgccagtcgcctttcaatatcaacaagctggtccagtatttagactttctgcttttctttgacggtgtcccatacatcgttaagtaccacgccggactgcttctccatgatgatgtactctgccccgagagggttctctggtgctcgagaactccatgcgtacactctcggaacaggaaggttcagaacgttcctcagctaaccaagttagtatctaggcgcaaataaaaattgcagtaggaaaaaaagcaagccatacgaaatccatagttgcaacctcactagctgtcgtcaagtgtggtctgcctgcattgggatttggaagtttcgcaataatgtcgcgtctatcgtctatggtaagctgaaacaatttgttatattggccctcggagatctttaacacgtaagtgcatgctttcgatccgaccgcagaggcagctactttcagaagcgttgagtggtcgaatttgacataacgacaggcaagttgctgtcgctcgttccaaagccaacgacctgaggtaaaccgattgagcgcctcaaggccatgcattgaatctgtgatactctcggtctcattcattttggaattgccagaaaaaaagaagccgccatgagtagtgcatcgtgggggttacagcgggaaagcgtggctgctagagttcttctcaggaaggggcctcggatagccttcatatctagcgttgcataaaggtagagagatctgtcatttcgctgtctataaagaaacagcgtgttgtgaatcccggttgtaggggctggacagaaggcgggtggtgacctgagccgattcgtcttagctgtctctacaatcgccacgacaccagccactaccattcttccacacgtaacctaattcctttctttcgcgttgagctggactagcgtaattgatatggcgccattaatatacacagctgccactgaaagtatcttggttctgttggtcggaacgaaaatgacccgaacatagtttccgaccactttcctcgatggtagtttcgccagtgtgttcttgcgaacataaggggtgctggaaacagacctttttactgcccaaggagtggaagaaaggtataaaaagagaaaagagaatcaagctaagaataactccaaatcgacacgattcgaacgtcattgagatacataaacatgtcaatatataccggggtaggaatatcctatctgcaaaacagtcaatggccatcactacccgcacctcagcatgcatatgtacaaaatgtcgtagcagaacattttttttcgcaagatgtatcaccgttacaagcgtcatatcgacccccgcagggaatcgagttcataacgaaaagcaggtaaaagacaacaacagtatttatcaatcatataggggcatagcgacatgagaaaggaggagtaggagaaggtagggtatggaggatagatagggaggcaggggtgaagatgttggatgagatggttgtgagggattggttgagggagcagcttcaattcgtgttgaggctgacggagacaagtgtggctgaacaagcgactgggttcaagagcgcaaccagccaaacttccttcgtccctcagctcccgtggacggttcgacgtgcaaactacgagcatacaagtcctagacaacgttaatgggaagaaaaaagattcatggtaataaaaatcttacctcctcgtctccggagagcttcgaatccaggatcaatcgctcgatttcgtcggacttctgagcctggggatgaggggtcttctggcttcgttgaattccgagaacaacctcacccatgacctcgaacttcttccagttaatgcgagatttgttctcgccgaagaatgtcttgttgccttcttcagcagaaacaaggtcgcgacggtggaggggtaggaatgggattcgctccgagaacgaattttcccaggctaggcggtaggcaaagtggcttcgttgggtgctcatgaggatgaccagacgcataaactccttctgagctgggatagggatcaagtctcgagtttgcgtgaggcggtggacgggagtgccgttgatggcggcgatgaccgcacccaaggagttgtagttgttttggcggcggagtttctggcaagaagtgttagttgctgctgacctataatagctggattgagaaaacctaccaccgcgatgttcatgaacttctctagcgcctgcgctctatgcttaggcttatcgcgtaagaggatcaggctggctacaaagaaggccagatgattgaattgcttgatcatccgattaacgttcgtcaagctcttgaccttatccttgtctatgcccgagaggctgacatgacgcacaagatcacgcggccggaatgaattgtacatgatccagtcaacccgcgtcagttctcgtgcgaattcctcttctggggtgtccatgaaaatccgccattggagtttgccaagtgaagtcttatgtgtcagttcaagacgcaaagcctctttttgagctgcctcgaggctcaataatgtgaatgactggctgatggtactgttcgatttgtcggtattcgaggagactgaaagagttcccgagagtcgcgatgtcgagtcatgcggcccactactgagatccagcgcactcatactatatatggggtcttgctcttcttcggtgtcgtaggtgttagtgccagagccagcgctagcgagagccgccgctggagaacttcggccggagttgtcgaagaatgtctcagccagttgggactcatcggaatcactgtcacccccaaatgcccagccaatatcatcatcttctgcattcgagtctaattgcgatccgatctccttggcagcgaacatgtagaaatggctcttttcgagtaaagcgacaaattcaatgatccgtttgtgaagtttgggatgggcgaaatctccaggataatccgaggcccattgagccatgacatcgagtaatcgcagctgatccgccatgcgggccagttgatcttcgttgctcagctcatttcgctcgaatcggctgatcaaggcacttaagagactagcgggagcagcaaactttcggtacagacataggaatgtagaacggaacttctggtcttgtttcgacatcggcaaggaaatcaaacgatcgactagctcatcgaacgatagacccgtctctgcactcgagttgctctcgctgctcggctttggccgcacgactgcgctagggctcgcgggccggctctgtccatcgtctccctcgtcatccatgttcaaaaaactgtcgaaagcgtccgatcctccactgtgtcgccaagcggtatgcaatcgttgctgacggttatcgtggttggtagagtgtagttcttgtaccgacggtctgcgggtatttaaacgcgctccggatggcggagtttgcggtcgcaccggttgcgagttcctgcgggcataacggtgggaattggacgtatgctgcaagtagtttccatcggttgcgagacggttctcaccatccccgtcgacacattgatcagaggctgtttgtgggccgccggcggctgtggacacggctgagagggtttccgagttggcacgagtatgatgccaatcgtgctgggaagagttgatttttgttgaagcaagagaaatattagaattattggagagatctagaagagaagagaggggttagttttttaggggaaaaccgaagacgagtttatggggaatgacaaaagtagcgaacgctcctgccgcgacccaccttggcccgctcccacttgggggggtcaaggcacacctggactcgacaatggttttgggtcggaaagaaagaaatcgaaaaagaaaaggtacaaggggtgggggaagagacgaaaattgcttaccttctcgagtagaaatcactgcccccaaaaccagcgctatgcacatgcgttgagatcgaggcgaggaaaacgacgttcgatagatctcgtatcggtcgtggatcgcatccacttcgatgtcttccaaaggttcggggttgacatcgcatttgcaggccacctgcaggaaaggaagatccgaggcggccaatgagtctaaaatccggggaaaatcagcctccccataccaggtacatccatcgagttcaggtcaaaacctaccaatgagcattgttgttaaagagagtcggtccggcttggtggcatcatggagaaccaaaaccccgtcaatgactggcgcagatgcgtcgcgccctgtacgcggccagatgatattcttgtcctcgtcgaattgaacgtgagtcaagtcgacttccatcagatgcacaatatagacagatccgtttaatgacattttcttcttgttcataggggaggtaggtgggtgcttcatatccagggcacatttgacaaagctggtcttgccggcgttttcttcgccggccactgcaatggtcacttctgggaagccgctcttgggatattcctatagaacagggggaaaggtaaccgtcagcaattgaagcaccgtagccataaacgactcagggtcctgggatcaattcaagacgtacccattcatgctgaccaaatcgtgtgcgcttgattgcgtcgcctgtaattggcgatgcctcctcctcctccagcaatgtgtgttcgaccttcgtccccgtgcccggtttccgcaccacgtcgagtttataaaggccccccggtggggctgaagaagtccggcttcccatgcctggtctttgggaagctgtagcgggcattcctcgagctttatcgctgtaagctctctcccggcgaggttgctgcgagatcatgacggaaacggtcggcaattcttgaggccacggaatggatcggtgtgacagcgctccaattactgtgtaagttcagagaacgagcactgcagcgcatccatcgttaggacagatcaggttcggttgagcagcgaggcagccatccgaggtgtgtgatcaaaattgctcggggagttgacttgaaaactaccctgattagccggagctgcgtcggatatcttggtcttggcagtaacggggaagataaagcaaacagataatatggacagatcacaaagattggggaacatgaaattggtttgaggtgcttttttcatgaaatggggttctgtcgtttcactggacgcccgagagatcttcgtgttcttgaaagcggctcagctaggtctcaaaatgggtggccacgagaaccgaggctgggtctaggacgatctcgcttagacaggtctacagagcgttgcgttatttctagacaaattggtattgattgactagggctgcagtagctgcagtagctgcattgactgccgtgtcatcccctgcccccggaaacaaaaggatttttgtctttgcagtcctacaagtaggtcatctacaaagtacagcttatacacctcatctgcccttgtcttgagattctccatgtgactagtcagaaacatgcagattcaagttttcgtactccgtacaatagtactttttccaccgaaatctcggtctttgaagttctaggccgtttgtgatatgctccgctttattgggcgctaaaagcgccgctaatcttacattatgtaggacttcggcttttagtcttggctcgcatggtagcgttgtatgtggtgtgatattgcactttaaaattatgagcgccataagctcggtgctcggtgctttcacccgtgcactggcaaagatgcttgctagcactaggagggagtagtatgcaatagagaaccatgtaaaaacccaagaaggccgaatattcataacttgcatgaggctgaatatggctgtagctgtcaaatctgacagctactctattggaaccgtgaaggtagataaaaagtcccaccatctcgtaaattcaatctgcatgtctcacttacgtgccgaccattcaactcgtaggcaatttttcccagaagaagatgtagatgactcaggctgattccttgcccttcttgacaagtgccataaactgcatgaaagcttcggcggtctggccagtctcagtcccttcctcgcaatcctgcctcagcttgcgaactctgcccaggccgcggttgaaccctttctcggacgtccatgggccacgactacgaggagctaacggcccacgacctcgcccgcggccacgcccacgtcctcgcgcgggagctgtgtaggattccacccattcttcctccaacgttgactggaacatatcttgtagctggctgcggagttcggggtgccgactgagaagctctttcatctctgacgatgcccccactgctgcgggggtcataacggcagcattggtgccagttggctctgtaggttcagggccgttggtatcgttctcgggtgtgggattgacatcgggcgctggggtgtcactcggttcctcgttcgatggtactttcggagcacagtatatcttatgtgactgggtgcatgcaagcgagcaactaaatcaatacctcttagcaactggtccacttatggataggatagaatcataatcgagtccgtacctcatcagtgcgcatgtgggacagcgatattttgagggctctaaagagcaaacttcacaggaaccaggcattgtgtcgatttcccaatggatccatcagctgcacagcgatcaaaattgctccctcatttttgtctgttccacgtcctgctttagaatgatgcaggataacaccaaagttgggcgaccgaatgatttgcacaaaactaagaaacgcgggtcatctgcttctgcctcaggcactcaatatttgtgagcacgcgtgacaagaactacataaatacgtgacgtgctatatatttagatcgaaaggctgcacaatatatggcaaattcggaaaggggatgccaaaactttcctcggggacctggttggggtctgatcgtcacgtccagaatctacccctatggtgtgacggaacaaagccacaatgcatgcgatacatcaagagccacgttcacccgggatacccaagggatcctatctttatccaccactcggggagctaaagcatgacattcgtaccgtggccatgacaatcacttgcggggatatcaaccggccatattaggtgcatccggtatcaaccccggcgcgagtgcagtttgttgccacctgcgagttgcctttcagcttatgtttccatgggttgattcatgacatgtcaagatcatgttgtcttccatcaagaaacgacacctttttcttgttccgaggagatctaactcgccacatggatatgcaatgcgtgattggtacactgtgttgcttcttcatttcgtagggcagggaatttgaccagttacgtttctttcggtgccctcttcgagtcatcacagccttagactcaacccatcagtgaagcgttgacggctccactattctttccgtttgctattccgcctgcgagtattatgcaggtagcactgaaacttgtactagacaagcggctatttgtctctgatcgccatttctcggaatcgggattttctaacaaatgagatgatgaactcggtggctactgctgctatccattctggactcatcatctgctctatcagccgtgtgacgcggttgaaacggaactatacatacaagtttatacatcaactatgggagagaactcggtggcaagagcacctcaacgtgttacattgttagctatcctgaaggatagactcatccttccgtttgtgaaatgctaaagaagcttgatacagcgtggccttgtcatcatagccagttcctctttgggattgagctcaatcattgtatatatcaagccttcggatgttcaatattttttttcggatctaccgagtttccttgttgagactaagctgaatcacatggtctaccgaacgactttcattctgggtagccaagcttctcaaaagtatagctggtgtgaggcgaagttcatacttcatgttctcccatcataaggcttcggaatttccacgttttcaaaagatagcctttgctacgaggctgacacagggaagaaatttaggtatcttccgagagtctgcgagtaagcttgcaattgatctaagtgtagaatgcgttacaaaaattacgttttgatatatgatttaggatgacaattgaccgtgacctactggtttgtcaagcttggaacctccgacagtcggcacatccattagttgtaattgtgcaaaacatctcttctcattggccagaaaaccctcctcatttgtcatccggctatgacctcaggtcacgtgtaatttaattgcgtcagagcggcagccgaggagaccctcgagtgtttttttttctattcacctgttgtcaactatctctgcccagtacattctataacataatgtctttaagcactccatctacaacaatgttccgccgcgctctgctaagcagccgtctggccactcccgtcgagtgctccgcccgaacaatcagaccggcattcgcacgctacagatatgtgtccagcgcagcccgactcccgaccatcacagcatcagagacccgtcgccgaccgacagtgcgaccgcaccagcagcctgcctcgcagggtggagtgaacggcctctcgccaaccagcaagcgcaccatcttcatccaaaccgaaaacacccccaaccccgacgtaagctcccaaagctcaattatctcatcttaacgaaagaaaccgaactaacctttcatctccgatattccaggccttgaagttcattcctaaccaccgcgtcctcccggaggacttccccagcacattcctcgagtatatgacaccacgatcaacccttgcaccaccacacccatccccgctcgccgcgaaactgctcgatgtcgacggcgtcacatccgtcttttatggcacggactttatcacagtgacgaaaggcagcgacgcgaattgggcgcatattaagcccgaagtcttcagcatcatcacgcaagctgtgacatctggcgagacgatcgtgacgacgatcgagggtgccatcggtaccgagcaagagagtggcgaggactcgctcgcctttaacgaggatgatgacgaggttctcagcatgatcaaggaattgctcgagactcggatccgccccgctatccaagaagacggtggcgatatcgaattgagagggtttgagggtggtattgttatgctgaagctgcgtggtgcttgtcgaacctgcgattccagcacggttacgctcaagaatggtattgagtctatgcttatgcactatgtatgtccatcgacgccttcccgttcattttgttttgacataaaggctgtttgctaactttgctcttagattgaggaggtcaagggtgttgagcaggttatggatgaagaggagattatttccatgcatgagttctcgaagtttgaggagaagctgcgccagcagaagggtgctgctgctacggcttctgcgcctttggacagcgcgccttaaaatacgatatctgggagtttataccttgtacattagttttgatatgaattttgcgtaattagattatttacccttctatggaactgcaaactatggcctctatccatattcattcacataaaatccctctgctcatgtagaagtactccagctctgttccaacggtggttgaccccagtctttcatccattctgagtgcaatctgttgagctgttgctctttcgtttggccgatagatcagcatcgaccgaatcattgccttaaacgccctcttttctttttccgtcatagtctccaagcccgcctcaacccgtgccttttgtatagagtattcaaacctctgacctaagtccctccgcgcagacatccctgactttgaattcaattcgccctcttcgttgaatcaatccagttttgcactccacttttcccaccactccgggggtaaaacgccaagtgcctcgacttgctctgcgttcacgcggtcggcagctgggaagaatgcatcaaacaacgggcgctgggcagcaacctcccagattatacaggcaagtgtctagatgtccgacgcaaaggagagcggctcatccgagaatctggcttcaggtggctggaggagagaaagggccttcgagtagaattcgggtaatatatttgggttgaaagattcaccgaaatcgttcaggaagatcctctcatcgctaatatcaatatccccgcagcggatgccaaaccaaccgggaacaaacacttgggctggtataccattcgttaatggctttccatcgagacgaataatagcctctgtggaggaatgcgactccatgaataagctgggcgataatcgaccgcgcgaccttaggtcggaaaagcgccaattttgaagactctttagtatcaaacaggctcatctgtgcaggcggagtgacgatacacttatgcctgccattaggaccggcaacccaaaattcgtcgagaaggggcggtataactcctcttccaggtctagacggcgcgttcccaagagaagatataagtctagcctcctgcgtgtagccactagcatcagcagtgatcactttcactgccacacatcgagcttttcgcaggtcttgggctagccatatggtcgagtatcctccatacccaagcttgtctatcactcgatagcgggcattgtctaacgcatccccgacttgtagaggatgatatcctccggggtggtatctgtctaggtcttcgacgtcttcaatcagcctatactgggacataccaggtcttctatctgtagaagattcgttagacccagctgtattccgactggtgagtgtggacatcgacattgacttttggatatggaactgattcgatagaaaactgcatgcttgtctagagaaccgcgacggggctacgcgagggtgtgtaaacatctgcagaggcagcatctagcataaggtcaaccgtcacgcttagatagttggcctgacggatgaggtttaggttgggagctgtggttcgtcgtacactggccccccttgcctgtgactgcaaccaattagcgagtcctcatttcaagctcctctccccactgagtaggccacatccaccttgaccactcctccactttgctctgcatgttacggattactagtgtaaatgattggtctttcacaatatttatttgggtgtgaccacgtcctacatatgcacaattatccgtattgcatagtacaatgagacatacacagtacctacgtactgtatcaattgaccagagtccgtgtagtactatcctagcttggcatgtcttggctctagggggtgagaagcaatcaaggaatgtatgtagatcgaagtgtcataaccatggaaacattgccttgctcctagccaactcggggtcctatattactccaagagaaaaaaggaaaaaggataggaaagaaaagaaaagaagaaaacaggacacatgacccggttttcaaatgcaccttacagcgcctacattagcaaacaattaaaatggaccatagccaacggctggatgctgcaacatcttgtgccagggattaaacccggtcggaaggcccggagcagaagatgattcgctctaaataatttacagagtggacattgatccttgagtccccatagacagtattgatagattttctttccctatattgcacaaggggtggaatcatccattgaggggttgaggggtacaggagtcacgttggcaatgtcattattgtaccacacgacggtgtggcacaaagctgttcaacggtccaggtgcatttcctgatatttagagagagagatttatagatagcttccgggagagaagtcaaggtgccaaaaggaggatgttcgaggtgagaagaagctcatttgatattggaggggctggtatgaagtgtcagaaaatgcacgtcaatccggggtaaagtggaagaacctgccccgcaagcgtgtgacccgagggccgtgcgagggctttctttcttttggacgtgaggtagagagccctggcgatactagatactgggctattggtactccgtagagatgtatatactgtgttcgatgtgtatacgtacttctgactgagtgccacaaccccagatgatcggcttatttctccaagggacccgcctgttctgggggggtctacgccacttagccaaagcctatggagagctccgtcttcccaacgatcttccaattctttattattccatatatcgctggaagtgtaggatggtcctaataagttctgctttatgatttccacgtctcatctgacaaaaaagtcgacctaaacatctctaaaagggaagctcccaaagaaactgaaaattctaaaaccaaagatcaaaccatagtggcccgtgtcctccggggcaacgttgccagatccgtaagagaagttaccccaggctctttgcgttcccctcatcttttatttccccctctcttctctctcccactttcatcatctacacaacacccttcttcgatcgcaagatgcgccatccttaaggggatccagcctaattccgccctcccccacgtcatctgcggtcacagcttcgatcgtgcaaacccagcgcattctatttccaatagaccggtcatcgaatatccggattcagcatcttcgttgacacgcgcctcatcccatccccgcaaaaagcactcctactgctcgccagacctgtccgacctcttccatcgccctcgttcctccgttcacgaaatcaacctgtgcaactcggacacagcactcccccaacattcttgacgagacccacaataaccgtgcgcaccttgcaaatagagatttcgagagaaacgatcagagtggtgagtcgcgcaacatttctgccgagccttgtcctgaacgcgactgggctgatacatgggtgattctccagacacaattgcgatcacgcgactgctgttcactttcgactctcgtttccaagtggatactattttgcttgagagctgtatggtgatctacacgcgccagctaaaccagctaaagattctctcgagtatttgacaccaacttgaggtacgtgcgattctgattctcggtcgctttgctttgctataccttatgcggtgtgcgcctctccgtggcgctatctgcttctcttcctttcgcactcttcctttactccccttgcaatggtacttccttcacatccatgtcctttcgtttcagttgcgcatagctgtctcttgatcgaggtttttttttactatccccacttccggaccctctcgcaagaggggccgaggatatgcatatatgcacaatctccgcttttaatattgcgtctctcagtcatgccatacctacatatgcttatattacccttcgtttatccttttctttccattttactatctatttcaatatgggaataatcactgactttaatttagccggagttgaacatagcgcatcgaccagtcatccatcgttcgcttaaagagcaggaatcgacctttactccaatctcatcgagcgcgtggaccaagacgggtgctttctcgcatgtgttcattttaccacgagacatctatacagtacagctttgctattaacaaagatcgtacaggtcagtgaactacctctcattcctccatggcctcgaattattccttgatcagacagccgttgtgttgcttcactaggtttcaagtggcgctcatggtgatacggtctgcaaggaataatcgcatgtgtcacacatattatactgggaatcatatactaacaatgcaacagtgttcctctaaccgtaatggcatcgccatctaacaaatcgaccccgatggcacaatcgtccccacccgctacggcaaccgcgtctgccatccttgaaaagactcacccaggcgtgcgccgttccaccccagactcggacgccttggcttcctctgacgatgatggagaccatggagcgcaagctcagaactttatcccccctaccaccagaccaccagtccgtcgcacctcttggttgaatgaagtgcctctttccgctcagcgtaaacattcgctgcctggaagccacctttcttccgccccatctaaccctacaagccctgctactgatcaggcatcatgggcgacagctacgagcccaaatcttgccggatctttcaattggaaccaacccggaggaagtacgcttccctggggcacaagcacaggaatctggaacacagaatcacgcagggaaccgccttctcgcttggcagaaatgataccctctccgaccatgaccaacccacctccttcgggcggcaccataccagacgaaatgttgagccctatcacccgtactatctctggcgattctgccattccattctccatcccgttacaaccaactctcaaaacctatcgctctcagtcatactctgttggtcagatggatccagagttcctcagcctggctgctggcaaggccggtgcaggtgcacaatacccaggaagtcgctcccgtgctcctggccaaatgtctgctgttcagcctcgagcatcacggcctagtatgctcggtgaattaggacatgatactgcaatgcttggtcgagtccgcgaggatgatgatgatgacggtgacgagagtttcaacggctcggaaagtgaaatgagctactcagcgagtcaggctcggcaaatcgagcagctggcccgcgagaacgcactcttacggcaagcagccgcggcaggtcaaatggataacagataccgtgaacgagctggatcggttgcatcaagcagtggagggggtcatccactacatcgcatccgaggcggcgttccagagggagatttggctgcagaggacctaggtgaattgcgtgatattaccggatacaacatgcgtggtaatgctcgtcgccgcttctctgagcatttggcgcccccggaagcgcaattctcgtccttcacctctccgctggagaatcgtgctctagataatgtccgcaaggctcattggcaaacgtctctaggcttcggtggcatgtctgacatgccacaaagtcgccgacattctttcgccgagattccgatgcgtcatggctcagtcggctctgtggactcgcattcgactgctactcctcgcgcaactataggagaccgtgatgacggctatagtaaccttggtgactatcccaaccgtaagtctatatacttctacacccttttgcttttgctgtcattcaatgctaatatcttctgcagaaccatactactcccgtgaacagaccttgcgtggagatggctcctcgggtatcccgtcatctctcaaccaatatgcgatgtcgaatgcatatgggcgtcagtcatccgcgttgtcacatgctcatcaaaatcagcttttgtacattgtcgccttcaaatgcagccgtgcagatgttttttacatccaagaagataccggtcttcaggtgaaaaccggtgatctagtcattgtggaagcggaccgaggaacagatctaggcaccgtcattcatgcaaacatatcactccaacaggcacgggagttgaagcaacattacgcagaagagcattacaagaccctcatgattttctctagacacggccagcctgaggggtccaccctcgccaaccccaacacgggcttgaacactcgaagtgccacaggtggcatgggtccccatggtcctcacagtgtgcaggaacccgcgacagacatcaaaccaaagcttatcaagcggttggcacagcaacatgaggttcttaccttgcacgataaggaaggaaatgaagctaaagccaagcgggtctgccagcaaaaagtggttgagcaccggcttaatatggagatcctcgatgccgagttccaaatgtaagtctacaccattccgattgccatccgtgatggttgaactaattgttacgcagggattggaaaaaacttacgttctactactttgctgattcgtacatcaacttcaactcactggtgactgatctgttcaaaatctacaagacccgcatctggatgtcagctatcaacccggcctcctttgtcacaccccctacgtctggcctgtcaggtcctggcaccattcccaatcctctctatgcccaggaagcagaccgtcgccaccaacttgacagtaggtcctatggcggagcgcgagattctgtcgacacaggtcgagatatgccgaaccctgtgggcatgcttcgcacatcctacggagagtcctaccagcctttttctcagccatcccgccactcagaagggcttaattcggatgcctttgccccacatgtgccatcgagctttggtcccgcagattcattcgaatatcccggcaacatcggtagctccaatggttcttcccgtgtgcacccagcgcagggcgaatggatcaaccggttccagggcctgtcgctcaactcctaaatcccttttcctgcctttccttctcttgaatctccgctcctcctcgcctatctctgtacaatcgtctgaccctgccctcccactacccacctgcgtcctgtcccatattatggggcttgttctcgcggtgaaaagagactccttatgaacctagatctgatcagctttgctattttctctttttcaacgcagatatcgccacctcgtttatctcgtctttttatcttttctccccttcctcaaagaatgctttccgctgaaatctggacgcgcttgccgttcgtttcctgtgttatgttcactgtgagctggtctatcatacttcttctgtgccccccgtaccctcgtttttatcgaggttttgaggtcttgttctgtactactgttgttagaattcatacccaaggcttgctgctctgccggacacattcccccattctgtcattaccgtccgccctttcttctcgccatagatctgttttttccgtgacgaatcatgtcttccataatcagaactatctctatctacaaatggatgtgtgtgttgtttgtgttaattgaagttaagttgaatccttgatttgagatactctcgtgtttgcttttggtatcccgttgataatttcttaacatacaagttgtccacagatcggaaaagtttgaaacttgcgattaccagagagaatagaatataaaatgggttcatacaaccctagaagagagatttgtgtcattattatggctttcctcgatgtacttccaaaatagatgcgtcgttctgttgatagagaaatgaaccaccatctaggtggccctcgaaggcttgcagagtgccatgcaccgcctccatgattcccttaccgggtctgcctgaatcgatcatcaagcccagccaatatgttggggtttctctcagtctgatctgagctcgcgtgacgcatttctattgtcttggctgtcagtgacctagatgtcgacaggccagaccgacaataggcgagagagaacattaaagccccggcatcaaggacccaagcccggagctagcacaactcgaagatatatcgtggcgaacagaaccaagtcagccttgtttcaggacagaaacactactaccatcccatcagcaccaactctcccaaaccaggaaaaaaaaaaaaaagaaaaactcacctgaagacctcaagcccacttatcatgtttcccactaaccttaacatccagcagaatctcatgaaaattcccgtccctcctccctttcctcaacctcctaacctcctcatcatccaacaccctcccaacaatcccctcaagctccttcttgctaatcttctcgtacgctttactctccttggacgcgcgcaacttcggcttaaatctcgcctgcatgcgcacgcgcaccgtcgtctcaaacgaaatcgtattcgcgtcgccgcggatctccacgccagaagcagctttcgcgttctcttttatcgagaggaaagactcgccgtcgccgccgtgcgtttgtagtgagaatgtccccgagacttcgggtgaggggattactaggaaggattcgtagtggctgactgccgaggcggttgcgctgaagaggccgtgtgtgtctgaggagaggtatctgtagttagggaggttgttagttttgcattgcattggaaaaataaaaggaagacagaattgaaatagaaattgggataatatggctatagtatgcgcatgcacatattgcgataaaaggcagtagtatcgattcacttacttcccatggtgtcccttgaaactgaacgactccgtccccgccacccgcgacgcaacccagacctgtcgcacatcgtgtggttctgccgtgctcgggtctctctcgatgaggttctcgagcttgctggcaaaaacttgcccgttggcgtcgcttgcgacgcaggttgggtcgtctgagggcaggactaggaccactgggccggcgatgtcgcttggagagtcggcggagacccagctttggtcttctgggttgtcgtctggttcgggttcggttttgcgcgatttaggggttggggcttcggtgtctgcggtgcgtgtcttgcgcttctttggcttgtcgcctttgaatgttaggggtttgaccattgtgattaaatgggtgatggttgttggagcttggagcttggagtttgagcttggagagtttgcggagggcggggacgaggccgggcttggctggggtgacggagcacatggttgactttcatttctatgtggatttggatgtggttttgtatatatagtcttctttttgctaatataaattccctctcggcgtaatatcgcaggtgaatgcttttggcccccattcgctacatgagtcctgactactcaatataggctagtgctgaactagtacggattgatactaaagcagcgactataacattcgactcttcatcatcaacttcttttttctcaaatttcattcctatctacgaaactctcgaccatctccttcatagaaccatctcacgtacataactatgtgccccaaacctggccgccttgcttccattctccgtccatggggcctgatctggttctcgatttgccgcaagtctttggtcaccgaatttccacgatgatactaatcatccattatagtgcattgggaatctttgacacaagcggttcgtcgagacggtctcgcagcacttggccgcccacaacaaattcgagatgccgcttcagcgaagttgttcagtataacctgtaaccaaaccatgtcttctctcaactcgtgcacagagtgaattgaccaccatatgcagctggaaatttcatcgcctatgaagacacaaccgttgtcccctcgctcgtacaagctgctagtggcgttattctcgaactgggccctggcccaggcaatcagattcatcgttatgacaccgctcttgtcaagcatgtctatggcattgaacctaatccgcacttcaaagacgccatagatgccaaattggacaagtataatctgcgggataggtataaggttatagtttgcggcattgaagacagcgatgttctgagggaagagggaatcaccgaggggagtttggatgccgtgctatgcatccaggttctgtgtgcagtaaaggatccaaagaatgtgatgaaggaggtgtggaagctgctcaaacctggaggcaagtttatattctgggaacacggatggagtagaaaccgcttgacgactgtagcgcaaggtgtgtatctgcctttcttcttttctagactctataggtgcttggctctggaatgacgcagaccggctaacatgaagaaaccttagcttgctggaatcctgcttggagcacatttgtcggatgtgatttgacgcggaatgtgctgccagacattctcaacagtggagagtgggaaaatccacgcgaggtccaagaacctgaagaaccatttagtctgttgcctaggattcagggtgtgcttgtcaagaaggcttaatgcctacatcgccaatatgtaagaagacaaagtagagctcctgcaatagcagcagtctagacagtctaaaagacaacatttccttttcaattcactgcataaacctgtcaataatattgccgatccgatttgacagattattaatctcaaaagtgctttggtctatcaaggtcctcaatttcaagtacacacaacgtcaagatgtcccatatttcaggaagagatcaattctattaaccatctctaggaaaacgtactttgtatgatgacatccacgtctaatcatctaattgaaggtgatggcagccttgatagcagtcttgttgcgcgtcgcctaaaggcactcctcctcctattatacaccttgctcacaatgccatccagttttacctggccagagtcaagattgtcaacagcagcagggaacttgtaggtctcagaataactgctgaggatcgtgattttatcgccgactggaagggaatcagcaaagcactcaagagaagcgacagcaaaacttacagatcttggctggcggccacgagacccgaacctcacccgggtacacgcggtacatcaccaacttaccaccacgacgaacatagttaatcgagtcgtcgagaatcttcaggctaccagtagcctaaacaacaatgtcgaatccatacggcttctcagccttgagagcatcaaattgagactggggactcgcgcgacagctcaatgtacttgtcagcaccaagcttctgagccaaatccatcttcagacccccaacagaaacaacaacgacattgcaaccaccattctggcgcagcatcttagctaacaccagaccagtaataccatcaccaaagatcagcacggaagagcccatcttcggagtgatcttgtccaaaccgtgggcggcagaggaggtaggctcgatgagagtcgtgtcgatataggaaaagttcttgatcttatagactcttccagctgaaagaatatccaaaatcagccttgggaggccggtatgctgttgagatattctacttacccgggtaggcgcagtcgttcaccgtcacaccgtgagcctcgaagtgctcacagaacagctcatcgccacagcgacagtagaagcatatgccgcatggctcggaaattatcagcgaccacttgctcgccgatctcaggcacagggacatcaatcttgggctccgattgctgcagggcacgcatggtattgggtacggaggtggccatgattgaatgtaggatgtgttatgtggagggaagagagaggaaaagttgagaagaggtggtttgacgaattgtaggggacatcctcaacggatcgttagacttcgctgttggctggggtgtcttggctgtcttgtttgctctttgcgctttgtgaaattgactgacttgaaacaagctgcggcaaggacccttgacagtggatgctactccgatccgtggccgtgtacatgtattcctagcctgagactaccaccaaccatcatacatgtgttgaccacgcacctaacactgccctagagacaaaatgatatgtttttctatatatacctaagacactctagtgtggaagtaaagaaaacaacttaggaaatgagagaaaaggaagagcaagctgatactatggacttgacagcaggtggcctagtggtaacattcatgcatgtgtactactagggaagtgccgaagatcttccaccacctggaatgttccggatcgatttaggttgctctcgcgttcgactcttttttattctcttgtcagatggaatatcttctcgcagtccgatggttttcgggggcctgtggtgtctaggtaaacacattgattgagatatttgaaaggatatctacatgcattatgttgtttgtcttccacatggaatatgcatctgtccagtgtataaatcgctttctaccgcttggtgctggtgctattcttgagcatctcttccaaatgctgcaaggcaagttagttatagggtctctgatagacatgtggacaagtcaaatgcttacctgcttctgctcaactgctaatttgccttgggtatcctatttccgattagcggacgttgcccaaacatagggctagcaacatacgctaatgatggttaaaatcaatgaataattgttgaagaggaaccgctctcttcgcttggcgtctgtcccattacgactcaatttggccaaaagagaatcgaattcagcagtcaaccgggccaggctgttagataccggctcatcatcaccagcatcgctgctgagcacaaggattccatgtagaagctgtccgaatcgttgagtcaagaagtggggcgccgaagactgcttcaagtcatctccgcctgcaatcgaaagggccgagacagcactgcgactagtgttggacccaactcgtttgagtgagtcgccatgctgatccataatcacttggaagcgtggccagagctgcatattggttccattaacatacgagtcggcgacgggcacctttcggcgctgaagctcaaacgcggaatgttggttgaggcgaacacacatgaggacacccagagaatccgtggtgtgctcgattaacttcttggtctggttctggccaagggtaaagaccggttggaatatttccacggcattgcgagagatttgatggaaggtctttggggagaaaaactcggtcaggaaagaatactcggcgcacacattgtccaccaatgcgaggttaaagtttcgaaacggcacttcgattccatggtaggtattatcctcttcggccagatatgaggataaagcctggagattgccagttcggaggacatcaatacgtctacccaaggagaaaggatcgtgtacggcagagccagctcggccgccaggcatcatgttccctgagataatcagtatatttgggagcatgagagcagtatatttcttacctgagcgatgtgtagatgggtcgcctccaagaacctcgtttcggtcaggaggataaaccttgaccttatcgagggcttgcaggtaacgtgtgaaatgagatgtgtaataccaacgcattgtgttgatgtacgcctgtgatatctctcctgccagctttgggtggacctttgagagataactgtatagatctttaaacttcaccagtcgctgttgttggataatctgagagttgatgtttggcgatcgcatagcacgaatttgtgacacaagataatctctgatcctttgaactgcctacatagatgtcaatgcaggtctacataatctgagggcagcatactcactttggtcttcacatcggctaaaaggggtcttacatcctcgacggctttgtagccgttggaggaagcagcggccttggcttcgatatttgttgttcgagaatcgatctcgttcagtgcacgcacccaattctcatcaattgggccttcgacaattgtccgcaccgccttgggggaaatgctgatctcctccacggcgggtcccagcagccgttccacgttgcgcctattctctagcatcgcgttcaattgtgttgagcgagattgcaaagtttcaatctctgcggatacggcacccagttcattctggaagtcattcaagtacagctcaactgacttggacacctcatcacatccagtaatagatgtatgtaactcttcaaacttatctcgctcttgctcgaattgctggacagtttgcgcgtttacatcactctcgcgcgttctttttattggtgttggatcctcctttttcagaaagtcttcgagacttagcccgtcaaaacggatagcttccaccaattgccctggtcgttccggcaccgacgatagcggcggcacatgcttatctgtctggtttttttcctttccaatgatttcattcaagacttccagcggatcgggaacattggccggtcgaggtcgttgaatactcgtctgctttaaaggagaaccattggtcgcccgtgcagttcctggaagagaggttgtagagtcgtttggggtcaggagaagagatgttgacgagcttctagatgttacaccagggcgactattgtagggacttggagatagctgggatgatgagcgtcgcggtaaaggagaaaggttgcggctattggctccggaggaagttgactgggctgaaatgcggtcgcgccacattgtgtaaagggatgaacggcatggaaatgcagaacaaaagcaagaattcaagtgtatactcggggaaatcaaccaagtaacctcaacaagaaggtcgaacgttgtagttgttaggttgtttcaggacactcggacgctccgcctatatacactaaacccaacaaggtggacaaccctcctcgaccaatcaccggccagtaagcgaccccgccacagcgcccacgatagattttagtcgtttgaatttctctctccccttctcttcatttttcccctccccaaattttacgaaaaacccccctctttcaacccctctacatctattcaccatgtctgccgaggaggtatgtactttcttttacaaattcgagatcccccaatggctgtctcgaggatttctgtccctgccccgcatgcggctccccttctattctcttctcgagggcacgaggctatattggactctcaaccccgccctattgtctcatttgaagcgcttgctaacataattcaatatagcacgatgtcactttcgattcggctgatgccggagcctcgctcacctaccccatgcagtgttctgctctgcgcaagggtggccacgttgttatcaagaaccgcccctgcaagatcattgacatgtctacctccaagactggcaagcacggtcacgccaaggttcacttgatcgccaccgatatcttcactgccaagaagcttgaggatctctccccctccacccacaacatggacgttccccacgttattcgcaaggagtaccagctcgtgagttcccctgatgacttgacggttgaattgttgggttgacgaatattagctcgatatcaccgaggacggcttcatgtcccttatgaccgacagcggtgacaccaaggatgatgtcaaggtccccgacaacgaggttggtgagaagatcaaccagatgttccttaccgaggagaaggagtgcagtaagttccaaacatatccaaacttcctcgggacttatcactgatatgtgccatcagacgtcgtcgtcctgactgccatgggcgaggaggccgctatggagtgcaaggaggctcccaagtctggttaaatttaatacatggatttattacctgttatgccagcctttatgttccacgagggctcaaagcccgccaaaaattttatctttcacggttcaaaggaggatacgattctttgaatgattatgcccattgcttcaagatctgtccccacataaccttggatgtgggctggaccgagaattgctttggttggcataatatgtgttgtccgaacagttctgagtctcagcatctcatgatagtgtgatgaataaatactcaatcttgcttgactgcgcgagggttctagtagactatgaagtagatgaatgaatttagagctcaattacactcaaccaaaatatacacaagtgtaaccccacaaataatgaaaaaaaagtacctacctagggactagaagcttgcaattcaatcgtctggtatagtccacggatcaatcacagcgcgcgcattgcgggacatgtggagcgacaaaaatcggcggtcactaggaggcagaaaaaaaagtcccgccatctggatataccaacccttctttgtcaaacaagcatgaacaaatcccttggggatggactacgttacccgaggggtctgcggtcaagaaggttgtcgtgagacccgatactatctagacaatggactttggtattgtcggcgcggtcatttgcaggaggtatgacgtccatcggcttttttttttatcctatcactgcatccaatgtcaggaagtacacagctaatggctatgcgacatgtgtagggtgttcaagtcgcagaagatgccgccgattttggaaacctaggcaaaacacatcgcgtgaagagagaaaccagggagaaggtcagcaagagtatgtaattagcagcttcagcctcgttctctctgctgactttactaacagcactccgtggccgtccggcatacacgcttttcttgcagacctaccagcttatcctttggaaacaatgtcatgccttggttcatgaacacgggttcccagaggaacttgaggtatgtgcatatgttgcttcttgtgttcaaggataacagctcattatttattagcttgttgtccgagatctctgggctcttcgtctgcaagatttcgaagcaagaatcactgattctactgatggcgacgacaatgatactgaatctgaggtattcagctcgcaagccgcaaaagatgaacctcgtgatatgggatttaaaccaaactcgagatatctcgaatggcctcgtctgatcgattctgttgcactgtgttatctcgcagcgttcttgatgcggctttctgtctgtgtcagtgatttccacgggtatgtatattctttcctccatgcaagtttgcttctagaatgcgcgcaatactcacattctacagcatgataatgcggcaagagatcccctacgtccgagtcctggcaactgtcccccgagaaatgagggataggcttccgccagaactgactgcgatccttgaggttaatgtgagtgtagtctgactctgggatattttctgggttgattgactgatcttgaaaaagtcaatacctaatgccgagcggtttcatcgcggcgtcctggcaatagtgttgttctatcagcgccggtttgaattggaccttcctcccttgaatttacccctggttcttttccggctcatcaagagattagccttaccaagtatgagagacagtccgccaagtggttgccagtttatattagctaacgaattttagttgagatatatgatacaactatgatcttgcaagatctattaggcttcacacttcagtatccgacaacaagttcatccgatggccgaaaaacagcacttcttcttcctgacttgcaattgatggtgctgattatcatttctacgaaactcctgttcccaatcgatgatttgaaaaggtatcccagcacagatcaagagcccgctgtgcaggtcatggactgggccctctgggcacgctcccagaaccacttcgatcgtgatcggggatttgggggaaatattggaaaaaagactgccattcagatcacagaccaagatgtgttgaacatgacgtctgcccaattagacgattacatggactggtaccaaagcagttggctcgatacttctaaggaacccagtcgcattgccacgatgtttcccatcagccgggcagaacgagatacccaaccaacctctagcgctgtcccagaatcatcctctgcttgtaccactgcccctgcctctgtccctgtccctgctactggtgctcctcctgataagactcgagagaagctcgaacttttgctacaaacagtcatgcaagccgttagaaccagaagggtcatccctgacgacaaagaggctgatcacgggcgtcccggcgagtggtatcaccggtatcgatgggaatcacatctcagtggtcccgcacggactttttatgaggtagcagcccagctcgctgcggtccaattgaaaacacttgttcgtgctgtcacatttgttgaattcaagatttcacagcaagatgaagagcgacagaacagagagtacttcgctaatttgggaagacaaggaatgcacaccggggaaagcgatgttggccacacgtatggcatggctgattttgaagaggacatgtacgaggcggggtccgaggatatggatggtgatgaaattttattgtaatcatatacacggcgctgggccttcgggatcatgtatctggcgttcacctttgtgtacaaccttttgtctttacctagttcaattacttgattttctaaggtttctgtgaattattgtctttctcgacgcattaatctttccagctgaggtggtagtcgaaggatttgtttattcgatcaggaaataccattgagaacagaaaacacgcttcatttatggtgatctactatacttgacgtagatgcactaccaagttatcattggctggttggtcgggctgcttacataacgtatgacgaaaatgggcaacaactagggcttagggtaccccgatcggtccacctttgctaagcgagcgaaatcctcaaattgacaatcgacagctccgcctggaacacagcgaccgacagccgacaacaacgagaactcgcaaccagtacgtcccataaacctcgtgaaacagcatccatgcatcgctatggattcagtgagctaacatcgtctttttccgcgccgtttcagtgcagatgtaggtctttctgaacccttaaatgtcatcgcgaaccacaatcccgatcccatcgccaatacgacccaaacccatggaggaaaaatgaatatgggctaatacggtgcgatgtagtttcgtcaagaccctgacgggtaagaccattaccctcgatgtcgagtcgagcgacaccatcgacaacgtcaagaccaagatccaggacaaggagggcattccccctgaccaacagcgtctgatcttcgccggcaagcagctcgaggatggccgcaccctgagcgactacaacatccagaaggtaggaaccggaattcaacttgtgatgtgatttggaccgagagcggggggcattgtggtatctcgggtggatcagatttccaacatgttcttttttcagagataaactctgtccacggatacgcaagaggaggaatcatcgctttgcgttatggtctatggtctgcgaaatggtggaacattcgctaacatgcgatatcaacctgttataggagtccacccttcaccttgtcctgcgtctccgtggtggtatcattgagccttccctcaaggcccttgcctccaagttcaactgcgacaaggccatctgccgcaagtgctacgtacgtttaccccgccttctccgcctgcgccagatgattgtcatgaagaaatcgcctttagtggcaaggccatgaattccatgtactaactcgaacctattacaggctcgtcttcctccccgtgccaccaactgccgcaagaagaagtgcggacacaccaaccagctccgccccaagaagaagctcaagtaaacgactcgccccttggtcttgtgctcggcgtgctgttccagagatggggattggctggactgctacatggagaggattacaaatggcgttagatatgatgataaaatcaatgcagccaccgtcatactttttctagttgactcctctcgacgaccaagttgcactccatgaaatgaaatgtgtaaaattcaaaaagtcgaattgcttcacatctccaaattccgtccgcgataaataaagagtacaatacatgcatgcgttcaataacacgactaggaaaactgctacctgagcaagaattgacggaatggccagtattccagatgaaaagccaatgatccatcctccctcgcttatgcccggaacatcatccctttcgtgtcgtccttgtcatcattggggttcttgtccttgttgttgttcttctttgaaaccgggctcccgtgactagtagatatgttagctcaaggtcaatttgtttgtcagacaaggacactacttacgcaaagaaaagcaccttgatagcaatagccagtgccgcatgtaacacaacaaccaagaccaagaggatcttgctagccttggcatcagtagcattcaagaccggatacaagttccgcagaaggaagaagacactccaagcaaagccaacgccaacaagcgcccagttcagcgcagtcaacggactccagctgaccagtgcaacggcaatccagaccaagttagagtatccatataaagcccagcactcaataaggtcagccgtcgagctgccgaaccaacgcagcgcaccccacagggcaataggcaaaatgccggtgtacccatagaccagaccagccgcgcccgatagcaacgtgaagtcgtactcgaagtgcttgtcatcattgttcgacagccattgcgagatagtgcctgtcaaaaacaggataaccaccaccgtagtcgcgatccagatcggcccgtataggtctgcgttaccctctagcacatcgaggaagttggtgcgcggatacaccgttgccacacagcggcggaagacttcattcgtgtcgacatcgaagaattgctcgtagtaatgcagcgaccaccagctgtatttggccggcgtaccgccaggggaccggtcacggcggcgcgatggcccgccacccaggaacggggcggagtcgccttggactttggcggttctttggtcgttttcaaagtctaagtaggattacttagttagagaatcgggctgggccggttcgcttggtggaactcactggaggggtggaattcgaggtcttcttgcaggtcggtatggccaaggtcgccctgctgatttgttagacggaatggtgtgttgttcatcacagcgctcttacctctgcatccacatctactacgacatcgtagcctcggttcgccattgtggttagttttgaggtaagctgttggaaggggagttgttaagtgtacacatcagcttccgcagataaagccaccgctcaagccacaactgtggataccagatcatacacgagtatgtagctaatatatattatttgctatgaattgactgagttctttcactacatgtaaattatgaagttacgatcctcagatataaggtttttttttggtttctgtcactttttctctttattatacacatgcaatagcaccaagcatccgcgatatctgacacgttggcttgagattaaacccagttccggattgccctttgaattcggccaacataagaccaaatcgaggtgtcgagtccctttttgcggatatagaaagatgcagttccaaccaatatagccagtaacacagaacccacggagcgacggtggctccataagaaatccatagctcgtttcctgcgttcttcggcccgaatctgttgggattgcttttcaaaaaagtacatcgcgtcttctggggtgcacttgcgatgtgggtctcgtgaagtcttgagcacgctacaccagggaatatgtttccaggctccaaacggcaaggattccggcgggtggtcatcaaagagccgagccgcatgcagaatgtgtccatcaagatcaagtgggcatggcagcttagaaagcgtaaaatgaagcatctcgggttcatacactggtattgccagcaactcttttttcctagacaggatcattgctgcgaagaggtaaattgcaaccacaggttcacgagataaaacaaagtcgaaaactcgtgagatattgctgtactcttgaatatcatgggcgtatagtgtcagtgtagctgcgagagcgaagaatggttcaatattgtcaaggtgtcgtcttagctcagggtccgttgtttcgattattgcaggaatgagatgaagatgtttcacggctggagacagcgatggtagcatgtagtcacgtatgcggaaaagggatatctgtgctactgctggcacggcctgcttctcgcctagtaccaaaagaagaacttggactatgtcatgatatccttggaaataacaaagcatagggtattccctaagcacctgggtgatcagttttgatagctgctctttctttttcaacatctcctcctcgggagctagactctattaatatccaaactcgtcttgtatggagagttttaatagcataccttttgggtaatagacaaatgatcggttgacgtcgagttctacttgttcctcatcggcatgtcgtaaaagttcagtacttggggccgtatcaaactgtcgtatttggtcgtcgcaacgtaacaaaataggccctgttcaccagttagttgagtctatgtgtaattttaccttcttcaaaccggaatatatactcacaggctatctgtctcaagtcatcttcaagtaacccgccttctgaagttgcgtgcacagccaaggcttccacatcgcgcgccgcacatgctttgcggatggcttttgccttttccgctcgagccatctgttttgctgttgtatccaattcgaaattgtttgagggttcttctgatgcagatgtgtcctcagagctgggatgacccggttcttttccggtatcttccattctttattcgctaagacgtccttctcaggagatcaagcagctaatatgcacacacaccagaaaagatgaaagttatcactcggtttgtttttcaatctaaatgaataacattcaagttgtgcgttttgaatttggctcaataacattgagagctcaatcggatatagatcgaccggagccttttcaccggacaacgagacgacgtgtccaaagcaacgactcaatgccaaatatgtgagaatgcgctttacctttaacaattaaggtccctttgaatgtgagctgatgaatgtctaggcacgtatacctagacgtggaaagtctgaagtcaaaggcggcggagtcccgcttagcggccttaggcatccatcggcagccgcgacatgttttccccgataacaacattcgctctgtgttaggcttaggcacaacgctccggtttatgcttttcagcactcatcgcaagatctcggacacatatatttgtgtaccgtgttgtgcgcccttaggagttcacagtttctggggctccgacagctcaccgacgggcggtcattgcataactccgggattggcttgctctgctagtgatagtgttagctctgtggcaagtaaggaattgcttcctggagcttggaaaccaatggagcttgtgtcaggcacgtcttcgagagctgatactactgtacagcgttcgggcaagctgtaagtctcacattgacatttgttcttcatatgtggggtacattggttaataaagatattgcagggcttgtctgggacacccttgactgtggaatcactgtcaactgcctatactctcttcaggctctagttgtgcatcggatatcaattcacagccagtatcgcatttggcagttgatgcataaatcgcatttgagacattccactctttgaagtatgaagacaagtggaccttgcaagcatcgaatttaattaccatatttcttgaatataggaagttacagggcggtgtgcagttcaaacaatattggggcttattgtgcctcagactggctcttgatattgcctattgcctactttccttactcgtttacttacgactccgccttatatcttccatctccatccttcatctctctctttcacaacaatcttcaagcttcttcgtatcacttgaccccgctatacgcctttggcttcagaatcatcttctcatttgctctaatctgttatcggtttcttgtgaaacccactcaattactgcaatgtctggcaaccagcccgtctcgcgtccgacgtgtctgactggactgctcacccagccactgatcccaagtcctgtcatcaactggattcttccagcgcgtcttcgagataaagaccacaacgatgttgttttcattggagagcggcgaattcaaatcaaggaagccctgcccaatggtcaccttcaagatgttgtcgaaaaatcagatctcgaaggctcgctcatcggggcaaaggtcatcaatgtaagcactcagttgccctgggaaactcagcctccatcaagcttgatggctcaccctcacgacaaaaatcaactcccacctcaaattcttttccttgctacggactcaaatgagctccttttcatgtactactcagagattggagatggcccatttgtttcctacagtcgacctttgccccgcgatgtcaacatagccgacaagtatggcaagcatatagctgttgatcccaagtaagtatcgcccattgctaactcagttggatcgacgaaagcttacaccatgatccaggtcgcgcgcggttgcagtcagtgcgtcgcgtaatttcttcgcggtcttgtggttaaaatctcccggcgaactccagatgcagatggcccagggaaagctgaacccaattgaatgcgtatgtcccagccatattttattggtcgtttgcctgataataacaatcaacaggaaagcttcgtacaagtggagggcgatatcctgttcatggaatttctttacccaaaagacatcaatgacaaacggaccattctacttcttctcgtctataaacttggcacaacacggtctatggtgttcgaatgggatgaagccagtatgctcaaccgcatgattcccaaacacacctcaatctttctgcctcaggaagaccagttgcctagcatggtcatccctttggctaaagaatcctcctacctcctgattaccacaaattccatggcaatgtacacacccaattcctcgtctcgtccgatgcgatacccaccaatcattccagatgccgaatcgtccgaagctggactgtggactcgctgggccagaccttcgcggaactggatgtacagtcagaggtacgatggaatattcctttgtcaagaaaaaggctggatctattatctcgagtttggcaacgatggtgagctcgaaacccagacttctctgggtcaactccactgcgatgttgatacggcatttgatattcttgatatgggccatgaaggtggtgacttcattctcgctgctggaagccagggtgatggcggtttgtttgtccaggaggcacgggatcaccccagatgtgttcaacgattcgtcaactgggcaccagttcccgatgcagttgttattccctcaaacacctcaggcatcttcaaagacactccatatgaacacgatcggatatttgtctgctcaacctctgcttcaggcaatggtgctatcaccgaacttcgatacggcattgaggctcagattggagtctcagccgcattgggtggattgtccagcatacgtgatatgtgggctgtgtcactcggtgctaaggattcaatatacctactagcctccgacccgctctcgtcgttgctccttcatacgactcccgacatgagagatggcattactgcccttgaggatgatacaggtttggacatccaacagactttggcaatggactctacaccttccggtgttattgttcgagtcacagaaagagctctgcacttttttgtccctactgatttctctctcagcagctgtgttcaacatgatccccttgtatctgtcacagcagctattgtggacggcccaagttccactattgtcatgactacaagaagtaaaaggggaaattttctccactttcttcggatagtcatgactgaaggacgtgcctccctatctgatcatgaagttccataccaactccaaaaagagcccatctgtatctcccaccagaattggggggaagttggcttcattttcctcggtaccagcgatggtacagtgctatcattcgaggtttataacgagactggtggaatcagacaacatgccgacactcgtatctcagtcggacgcgagactgcaaaagacatgtcagaaacgattgaaagcctcgctattatcaatactatctcaggcggtagaagccacgcgctccttttatgtgggcttcgaagtggcatacttgttccattcaatgtagatacaaacgtcgttgatcatcagggtgaccctgtattcggtttcaaacgtgagtcgtctttcgttcagcagactggtcccttgcatccctttcattaaccaggcactttcccttcaggtttggaacaaagagcgccacaccatcttgggcaaacatcaatcaacctcaaagcccacaataattttgcattgtttacatgcggagatgatttctggcgtgtgtcatgtgccccgaatggcaaggacttggactgtttcttgtctcgcgtttgggttacagatcaaaactgcgtaagttatattacatccttcccttttgagctatggtctaacattcatgccagcccgcatactttcctaccaggttcagcagcttcgaccttgtcgatgtaagagatcaagagtcagggattccaactacatacatgttttgttttgcggatggtcaacttctgatatgctctctggatcaagaagcaaaggtcgttcctcggcgcatcgacattcccgggaatccaagcaagctcacctactccgatcatctccaaagtctcattgtttcatattctgtgacccagaccggaaatcaagaaagtcctctcgatatttcccgcacggcatgtatcgagtttgtggacccagacagacagtcaccagtggtctctaccgataaaaacctggttgcccaaggccatctcccctggagaccacatggagtttctggtgagaaagtcacatgcatttttgactggatgccatacaaggatggcaatgcataccatcttatcgcaattgggacttcgatcagtttgcctcatcgacccaatgaccgacaaggtcgattgatgctcatacaagcgtctcgagatgccaacgatcctgggcagatcacttgcattgacaagcacacacaatggtttaaggacccagtttatgccatgacggcatacgacgatagcttgattgttgccgctgggaacaaattcttcacggtcacctcacgaaattctatgacgaaatgggttcgaaatatcacagctactcttccatccccagctgttgagatgacaatgcacggaggcatgatctatgtcaccacctcgagacactctctgctggtctacaagatctcaaacggggatatcttaatgcacggtttcgacccaatggcacgcgatggtttgtcgcacagtttattggccgggcatggatgtcaatcggatctccttcttgtgagcacccgaggtggagctactagggcattcacagacctcgatcaaccaggtgaccttgtgcctcgtccaacggccaatctccccgtctcattgatcaagctcactcgaggctacaggtctccagctgtgctgacgaccactaagaccttctatggttttggtatcaatggatcagtctacaggctcttgtgccttggtgcgaaggagtggcaccttcttcgacttctgctcaacatatgccttagggatgaggtcatctgtccctccctgtcccgcaggcaccgctaccttgatgcaatctcccaggtcgagaacagtatgcatatcgacggcaatatcctcgctcgccttgtcagtcgcggcttgaagcacctggatgaggttctcctggcgtgcaacgagagtcagttcaaggacctgactcctgaaacagtgcacatgttctttgaggcagttcgggacgtgcttggggttaatgaacaccatacccaggcggtttttagctggcttcgtcatattctacacgttgagatctaagatatgaagagtatttggccaaggtgaagaagtgtggagaaccaagcttggaggacatagccctggaggtttgagtcaagttgtgagagtgtatctatgccctagttagataaaatgttagtattaatgttcgaagttcgattcctggtagcttagcacatatgcgatatcagagatcctagggaaaaaaagcccctgacagtatggggcaactcagataggtttgtggttgtggcgattagaaagtcaagtccgatgccatattgttccccaccggccatgattcttcccgaaattcttttcccttcccacacccctccctaggcccacgttacagagagctctatctctcgcctttcattctggggattgtccttttttgacttctgacatcctgcccctttaatacgtgtgcgtattaatacaagtcgcaagtaaccggttaactccgtttgtgcgcccacaacactccaatcggaccaacaaaatccccaagggaaatctatcgcaatggcgcccaagaagaagagtaacaagaggcaggaagaggactgggaggctgatctcggcgagtccgttcccgccgccgctcccgccgacgaacagccccaagaagatgccaacgaggaggcagcgccggtcggtggccttatggctgctttgagaaaaaacaaagccaagaaggctaagaagggcaagaccaatgactttgtcgagggtgaggacgccgagggtgtcgatgctttggctagcaagcagcccgaggagggtaacttcgatgatgacgatgtcttcgctggaaagaagaccaagcccatcaaggaagtggttaagcctgcggcggaagagcctgagggcgagttccgagtaaagagtaagaaggagaaggagcgtgagaagaaggagaaggagaagcagcgcaagaaggagcaggtaggtttttacatttttcgccatgctggaaatacgtgccgggtgtccagctcatttactaatcggtctttctctcgtctacataggctgccacaaagaagaagctcacccctgctcaagaaaaggccgaagccaagaagactgccgccgctgaagccaagaaggatgaagccgccgccgccgccgccgcatctaccacagagactggcaagaagaagaagctccctcctcacctagcagcccttcagaaacaacaggagcttcttcggaagcaacgtgaggaggaggagcgcattgcagcggaggagaaggctgccgcggccaagcagaagctcctcgatgaagaggaagagaagaagcgtgcagaggctcgtgagcgcaagaaggagaaggagcgcgaaaagaaggaacagctacgcaaggaaggcaagctgcttaccaaagctcaacgagaggccaaggagcgcaatgaattgcgcatgcagcagatgattgccgctggtgccaaggttgctggcttagaggagggtggcgaaaagaagcagcgccctgtatatgagaacaagaagaagagggctggcaagaagcaggaagaggacctcgaagccgccgccgctcgagcccaggctcagcgcgaagctgaagatcgaaagaaggcggccgaggagaaggcgaaggctgaggccgccgccgctgccgctgctgctgctgccgtcactcctacggaagaggacgccattgaagactgggagcaggctgccgatgaagatgtcaaggacagctgggatgcggaatctgatgaggaagagaagcccgctcaggaggcaccttcccaaaaggatcagaaagaagaatccggctccgagtccgagtccgactccgacgaatcatctgatgaagattcatctgacgaagagcaatccgccaaccaaagggccattcaggcaagaaaggccgaggctgcggagcgaagaaagctcaagcacgaggaggctctggcggctcgttcgaaggatgatcttcgatcccctatttgctgtattcttggtcacgtcgatactggtaagaccaagctgcttgacaaaatccgacagaccaacgtgcaggagggcgaagctggtggtattacccagcaaatcggtgccacttacttccccgtcgatgctctacgcacaaagacccaggttgtcaacaaggatggcaagttcgagttcaaggtccctggtctgttgatcatcgatacccccggtcacgagtccttctccaacttgcgatcaagaggttcctccctctgcaacattgctattcttgttgttgatatcatgcacggtctcgagccccagactcttgagtctatgcgtttgctgcgtgaccgcaagactcctttcatcgtcgcattgaacaaaatcgatcgtctttatggctggaagaagattgataacaatggcttcgaagatagtttggctatgcagaacaagggtgttcaaaacgagttccgcactcgtcttgaggccaccaagcttgctttcgccgagcagggtttcaactccgagctgttcttcgagaacaagtctctgtctcgcaacgtatctctcgttccgacctccgcccacaccggagagggtgttcctgacatgctgaagctgctgaccagcttgagtcaagagcgtatgactaactcgcttatgtacttgtctgaggtcgagtgtacggttctggaagtcaaggtcattgagggtctcggtaccaccattgacgttattctatccaacggtattcttcgcgagggtgatcgcatcgtaatgtgcggtctcaacggacctattacaaccaatattcgtgctcttctgacaccagcaccgctcaaggagctgcgtctgaagtcccagtacgttcacaacaaggaggtcaaggccgcccttggtgtgaagattgctgccaacgacttggagcacgctatcgccggttctcgcatgcttgtcgtcggccctgatgatgatgaggaggatcttgaggaggaggtcatgaccgatctggagaatctgctgagtcgtgtctcgactgatcagcgtggtgtcactgtccaggcctctaccctaggctcccttgaggctctcctggagttcctcaaggtttctaagattcctgttgccaatatctccatcggtcccgtttacaagcgtgatgtcatgatggctggtaccatgctcgagaagaataaggaatatgctgtcatgctgtgcttcgatgtcaaggtcgataaggatgcgatggcctatgccaacgaaatcggtgtaaagatcttcaccgccgacatcatttaccacttgttcgataacttcactgagcacatggctcaaatcacagagcagcgtaaggaggaggctaagcttcttgctatcttcccctgtgtcatcaagcccattgctgtcttcaacaagaccgaccctatcgtcatcggtgttgatgtcattgaaggaagcctgcgtctccacactcctttggctgcggtcaggaccaatgccgctggtgtaagggagattattgatattggtagagtgtaagttttggttccctggattttttcccccttttgtctgatttctgacgcaatcgtttcacagcacatccatcgagcgcgatcacaaggctgttccagtttgcaagagaggccagccctccgttgctgttaaggtcgagggtccgaaccagcccatgtatggtcgtcacctcgaagagaaggatcagcttatctcgcatatctcgcgtgctagtatcgataccctcaaggagttctaccggtccgaggtatccatggaggaatgggctctggtcaagaggctcaagcccgtcttcgacattccttgaattcagtcttagggcttccttccggtgtgcggtgtcttcatatcaaaagtcgttagcaccggactcattccagccttgcggtacctatcctcaagcgaacttacgatcaaatgccagtaagtggcgagctttgttctccgtcggccctcatggccttcggttccatcatagccagtttggaggaaacgaatcgaaatttactaagctatgacaattgctatcgaaaaacggaaaagttattctattttgattacgatttgaacatacaatgaatgaccatgacttgatggatgaacagcgagagaggtcgcttgtacatgatataggaaaagcaaggcctggtcgataccagatcttttgtttctgttgttatagtggattgaactgatactattcaagtatttgcattagcgaacagacatttggactaccatgtagttgatctttatcttcaacgcagaaagcaagcagaagcaattgactagtttaggagctagggagatctgtttcttttctagcagagaccaaatcgaacggttgcttcacaatatcagaatagaccagctgatctactcttcaaggtcatattcagcattatgtatgtaatatgtacaatcctgttctcaaccgaccaaatcacctttggatatcaaacactcggcaaatgagcactatttcagcatcaagatttccctaactcaaatatcatccccctcccacctctcaaccttcccgccatgtctctcccaatccaaccaactacccatataaaccccgatattggcagggtcatatccagcctgcacggccatatgcgctgccgtcttagcccgcacaccagccttgcagtagaagaccatctgcgcaggctcgccctcgctctccacaggatcaggcttagggaacccgaaccgggtctcgaattcgtccggggtgagatacaatgcgtctccctgtgatgctagcgggatgcagactgcagatgggataatacccgtacctttgagctcggcaggctcgcgcacgtcgatgagaattatgggcttgtgagttggggagttgggggttgaggatgggagggcggcgttgatctagatttggttttgtcagcttattatcaatagcttcatggctgggttcattgtggtgtttggtccaaataaggaagtaatggtagaggaggaggaatgacaacagactggagagtacatacatcttcgaagccccattcccggagtttgactgggctggcctcatcgctgttgcaccgcgtctgcacctggcccagattcttggtgttccggcttgccttagcttgggtgctgcatgctggcgccaggcggctggggatgacacggttctgaggagaagtgaccagtcctctcgtcggtgcggagagagctcggtgcaaggccgcggctggtgataccgcactgcgtgccgagattctgactacggcggaggacaacacgacagcagatcgctggatcttcgatggcaatgtcgaagccattgtttcaactctggattttgattgtccgcggaggtgaggagttattacatctccgaacgtaacctcgggactgtgatgtcagtatctgccgtgggtgaccgcctactggtttaggcttttgttcattatgcgaggcattgtacaagctttgtcgagcaatattgggatttttggttggctagaacgattcggttgattaggttgtaactagggagggttctttagtagacagatgtttcgtttgagttttgcatagatcttgtagagatggcacagatatcacagatatatagtggagtgtatgtatatcaaatgaaaacctgtaattgagaaattcactaaaaccatacatagaaaaacgagtctagtcctttctctaaactcaaaaaggctatattgacctttaacagatatcaggtttaagattgtgataaaaacctcccaaagccaacctgtaaaccaagaagaaagactaaagagattaagtatataattagttgattcaagcacacgaacagttagataacatgtcataatattcaagcagaaaaagataattaatattgttctaatatgcatggctctaggagtagtcactctgaagaaatgaaacaagaaacccctgcgacccctcacgggcaataggtaatcataatcgcagcgggggctcctttggaaaagggtatggaaggtctctctaagagaaacatatgttaaagacttgtcctatatcgagcatgcatcgaagtcgaatgagagagaagaaagtgtcagcggaccatcccagccccaggacaggaaggcatcataagtcctctgtccagaaagtgtggctgggttccagctttgcttttgtgttttgtacaaagaagagaaaattcaagggcgggcgcggaacgtaagaagacagtcatcctgatatatattagtgaattgatcggggtagaaaataagcttgaacatacctgagggaaaatggtggcaaacaccttgatatcctcggactcgggagtaggggtgtgctcccagtccatcaccatgctggcctttccaatcatggacatcagggaaagctgagcataggtctgacccagacagtagtggggacctgtaccaaagaccaaccagttcttggtctgctgctcagcggtaccggtgatccagcggtctggatcaaacgagtcggcgttggggtaagcctcctcgtcatggcatgcgggccacacggagggaatgatcatcgagcccttggagacggtgacagtctcgctgatagggaagtccttcttgaccaggtagggaaccatgatgacaggggggcggtagcgcagtgtctccttaacgacggcgcgggtgtaaggcatttggtctagcatatccatggtggcggggagagtgcgatcaccgttgcggacgttaaggttctcttcacggaccttgtccaggatctcggggcggtcagccatcagctggaacaaccaggtggaggcggcactggttgcatcctgggaagcgaacaggaaggtgaagatagtctgggcaatttcgaaatcggagaattcacgaagaacctggctaggcttctctgaagaatcgacctgaattcccttctcaatcttctcgcggtatgcggcggaatccagctgggccttaacccaggcgtccatgatgcaggaaatctcaccaccagcagccatacgggccttggacttggcagcacacttggtgaactcctcaagtaccatatcagcggccttcttgccgtaccaggtcttagtgtagggaaggatgatagggaagttcaccagctcaagcgcggcagtaatcagatagtagtcatcggcaattttctggacgccctcatcagtgatatagtaaccgacaaaggtacggcacgacagagcgcacatgagctcgcggaactcggacatccaaggggtcggggtgaagttggtggcggcggacttctggaggaatttctcgttgtaggagttgaagacctcctcggagcgggggaggtacatcgccagagcctggcgagtgaacaacccgttcagacccttgcggtaatctacatgggctttgccatctaagaagacccaattggtcttgccgagaagcttgtgcgcggcatccacgacacagggcttgacatagccgggcgagttgaaaatcttccgggacatatcacgagtggatgcaatcacgacgaaccttagtagaaagtgttagagaacagacccgaaagaaacaagtacatcagggacttctcacttgtggaagaccgacacacagctgaggtctccgctatcccatttcgccttgtattcggtgaatttggggttgactgattggaggaatgggcccataaagggaatcttgtacatagggccaacaatcgcacccttgaggtagtggtatttgactgcaaatagggggtctgaattagtttcaagacgcgatttcaaaggccacacatgtcgcatttgcactcacactgatcatagatgacggcggcgaccaagaaagtcaacaggcccttccaaatcgtgaagccatccaatacggtggcaatgagaccggccggcgcgaaaagttggggcgagaccgtcgcatccgccgatggcgaggcaaagctcccggtgaagttggccatgttgaccatactggggagtcaacggagtcaaagttccgggcaggaattgaagagaaaagtaattgctaatgagaaaggaggaccgaatcccagaacaaaaagggaaaaaagtgagtggagagagaggggggagagaactgactggggctctcaggggcgggaacgccaattacacggaggcccccgggatgctcagcattagcccatatcaatgcataaatagtttgtgtttcgaatggtttacgaaattaacatacaatagcttctgtaagattggattcttatgattttattgattatttgtacagagatattcttacgcccaagttattatttggacaatctctgcttaggcccatagttcgggggttcttagtactaatctccgagccggacttaatagtatcgaagatgcgcaaagataacgaagtcacgaatagcctagaatgagatatgtacatagtatggagtacctacagctacacatacaataggacaactatatatgtacgtactccgtttgtatcttaaaatacagacaagtcagcgcaacgccatatcacaattactcagcacgacgtgaccccggctagagaattcccgagagttagatcggcgctgattggttgaacgttgattggctgaacatcatgtaagggctcctatatgcacgtgcttgtgcttgctactacaacgtacatgtcgtactacttatgttgtacatattcacgataggaatcaatgggtattcataacatggcatctatgtaaggggcttcagcgaccaccgaaaccaaaccatccacgacgacctttcgtttcttcttccacgggaccttgggcttgagcttgtgtctgagtcagagcctcctgtcgctgaccaccttcacgtgggtaatcaatgtagttccatgccacatcaaggaacaagggcttgacaggaatcggctgcatttgaggtggatacggtaccaaattattgaggtctagtccagatcctgcaaattgttgcagtcgttccaccactggccgttggctcgactgtgacgcctcttccgcagtcaccttctccagagtgacaagtccacgatattgagcaaccagttctcgcaaggttgactccaaggtactcgcttgcacttgggatacgtcgagctttgggacatcttcagcatccgttgctgactggggggaaacggaagcggcaaggttcaaggcttgggaaaacagcgcaagagcctcctttgatctcgaaagcactccatgggatcttcctaaagcaagacatctacaatgaaaaaaaattagagattagttgcgaaaatcggtgaggatcatggtgagaaccatacctgagggcacggaagtagtgccgctttgcctctagaccctgcacaaaggccgagtcggccgcaacacccggaagctcgagaataaattccaagctctggagtgttgaatcatacaggacgacccgctcacggagtctattcaacttcttgccattgcctgtggtgtgcttcgcagtttcctttccacttgttgtgggttgctgttcctcaaatgacaagccgtccctttctccacacaacacccggttacgaccgacccgccagccaaccaaagtgtaattcactgcggttcgagtgatttgcagggcctgcattctcttatcactgggatcaacaccctcactagccaagtcatcaatggcggatttcgttgcatcgacagcatcctgactggcaataatcacgttatcatacgcagcagctttctccttagcagcggcggactttccagcatctgccaaccaagtagtgagccgagcctccgcggctgaagcagcagccaacgattgagaaatcgaggcgtcgtccagtgggacagtccgcgacctccaagtgacagattggggcaactcctgcacttctccctccgcagtgcgtcgagtaccggctgcttcttcagcgagacaagaggggtcgatcttctcaacctcagcgcaaatctccgaatccgacgggaagaattcaatcgccagtgatgatgtgggtttggaccggggaagcttcatctgataagccgcgtatcggagactagggtcaacagtcccagagaccaggtcccggaaagcgtctttcttgaccctttgacctaaagctgtgtaaatcactcttgcaatggaatagtcctggagacactgttcccatctccgcttctcaagccacagggtgccagaaatcatcgccaaataagcccgagactccaggatatccatatcacttgccccagaaagcgattgttcgtgaagcagcgacactagatgctgtgcatacccagtggccttgttcagtcgcgaaataatgtgacgccgagcagcaccagagatgccctttgcggaagtatctgcggaatgtgtagacttcatgtgcattgcttgcgcccaagctcgttcggaactaagaagcaaaagatgtacgtatctggcgtgggttagaaactaatcgaaagagtaactgggactggaaaggtaagcaacatacgacacattgcttccaagattctcagcagtcacagctggtttggcagtatacttgcggcctttgacagtggcctgaccaagcttcttgcggagtttctgcagttttctggtagtgtgcgcccggtaggcattgtagtctcccacaaggagcgcctcctctctctctttaaagataaagtcagtcacctccatgacacttttctgtcttgttcctttatttggggtcctagtgatgagaatgtgagggacacggttgaagtagtgggctcagcaaaggcggtgaaaccccggcaatttcatgcacctccgaatcttttgctttgtgttctccaagcttatgggacctcggatttaccattgtctctttgttcaaatcaaggtgcttggaccttgattggcaatttatgtccggaacctgtgtgtgagcaacattgtgtttcacaagccgaagagtccgggcttcctttcctggtacgaatggcaccaccaagcacaacatgctcaattgcttgtcatactcaaagttaggacattttgctgacagaataattatccagacagagcttttgaacccaatacaatacagacgacggaattatagcggcatcttaccgcttgaggctacgattgagggtgatgctcgaacgtgcaacaagctcccttgagaacgcgggacggcgtttccttcaagactccaatggtgtgatccgaaacggaagctgtctctctggtcatttttggaagcataccggcgttggagcgaatgctcctcagtggttcatcgcgcttttgcaggcgtcaggccaacgatcgtcccccgttcttagcactcaacacgaaagcagagagtcaagcgatgggataggcccatcactcgaattcttataccctcagcaggctcaaactttagtagcttcgcgtctgcctcgctcccaaaacaggactgggtttcggaggagacacttgagcttttcaaggtcttatgtttctctttcaagtctttgccaagctccatcagaggcttcatccaggcatgaatatgcaccaaagctggcccaagtacctcaaaatccagaatctctccataaggacggcgaagcgagcgcatccctccaggcgttccttcaggagaatggcagcgaatttgataaagcttgggtgctgtacgttgcagctggatgcccgtcgaaactcaagtctgcactctgtgcttatatgagtaaatcaccgaaaaaaaaggatcaacgccgagcatggacactcttcaacgaaatcgcacccaaagatcgcactgacttagacttcaagaacatcataaagtcacagattctgtcgctacccgagaatagaccccagcatttggaggagatctgccaggaagccatttccactccatttgcccaagaaatcatctcgctgggcctgatgcacatgatggcaaacagacagtggtctaaaattatctcactctggaagaagctattggcgacccgtgcgaatgagcgaccaccattggacttttttctagatcgatttgatcgatttcacttccctgattattccctttcgaggcatctccttgctttcactgcgcacctgataagtgccggcacggttagtgcagcagcaaatgactttttgcgccgtctaattgagcgatttattagctctgatgacatggtcatatccacaccgattccgactttgcttgaactgttgcacaaatgccgtcctcttagtctcccgaccacaagacactatttcaatttgatacaagtcttcctacaatcagagcagaggccggaattagtcaagtgcattcttgtttaccgctactttcgttcaagatttccggatgaaaggatgcacctcaccactattcgtgctattactcaacgcgtggtgaaattcaagatgaccgacagcatgctatattttttggacgaagaggcgcactttgatgaaaataaaagaccaagcatgttgtcgtacaatgaagccatgagtgcattttcacggattggggatgtacgaactgtccaacacctgtttgataggttcctggcagatcacggccacccaaagtttcatgggtcggtgaccccccttcttgctgttcacgcgcggttaggtgatgtgcgcgagacacggcgacaattcgagcgaattcctacagaatttggtctcccggtgaacacaatttgctggaatatactgcttctggcgtacactactgccaaggatttatcgggtgctctttctctattctcagaaatgcgagaaaataaagtacccttcaactcgtacacatttggcacactgatggcgattttcgcccagcgaggcgacgtcgaagcaatccgtcaattgctcaaagaggcgcagaaaagtcgagtacaaatcacgagaccaatgattgaaacggccgttcaagcatactgcaagaatgggcaattggcccatgcagaagagcttatcgcactgagctgggatttagcggtgggagggtctcccttgcgaatgtggaattttcttctaatgcggtatgcattcagggtatcaaagttttccttccgccgtgtccttgaccgcatgggacgcctaggattgaaaccggacgacatgacttacgcggctgttatgcttgcttatgtctatgctaagcaggtgaatcgtgcgcaagctaccctcaggaagatgcatgaagctggttttcaagtcaccgagcaccattattctattctcttgcttggatatgtgaaggaacggaaccgtgatatggtgtatgtcatctcccgcgaaatgcaaaaacgcttcggtcgaatcgggatggaggagagccttttgagcctgagaatgcagattgcgagagacgtggagactgcaaaggatctcgaaatccctattgaagatatcgtgttggagaacgcagaaaagacgcttgctgaatcaatctcacgattcaatgccaatccatcgccagccaacagtcgattatctagaccgttagagggctttgctgttgagtctttcactgccacgcactatcaacggctgatcgacgcatacggcatcgtaggtggtgccagaaaagcactcgaaacttttactcattacatgcaactcagacgaaccgcgggattatcggacggcgatgatttgaaatctttaccgattgacttcgtcaaagccgttatgaatgccttttcagaaacccagaactacgagaaagtggaagagtgctggaacagtattatcgcaaatgcaaacaaggcagccggtacctgcgaccttgacaaaatcttgtcagcaccgtcgccggagtcaacgctgccagcatcagatgtgtcctctctcccgtcaattttttcaatgtccactcaggcagaaaagcccaaaatcattcctgctcaacgcttcatcctggactatccactttcgctttacctgcagtcgttggctcgacgaggcatgttcgcgaaaatgcatcaagttgtagccgaagttcaggcagcaggctttgcattgactggtttcaactggtcaacttacgttaggacgcttgcgacatctgatcattatcctgacaatgtggaggcatttagacttttcgaagagaagttcattgttcatttccctggttggtcgtggtttctcaaaggatatggtgtgagaccacttaacgcccccgtgacaatcctccacctcgaaggtcgcgcgggtatcaccaaatctcgcaggatgatgggaaagttggcccgaaagcattggcgcaaaatcgaccccggttacatgcaccctcattaccccaccatggtgcaactagcgagcacattgcaacagctccggcaaaccagtattacggaggggaacgagcatctggccaatctctacaagattgcgccacagactgttgatgcccttgccgcgatgccaaccgtggctgataaatatcagggctccatacttcgcggcaaggcggcaaaacgcgatatcctcccacgcccaacccatctgtcctcctcgcactctggtgctcttggccccagtcgcgacatgcatgaacgcaccttcgatgacgcgactaaggaacctctcgtgttgagaaaagaccaacattccgagcccgctgtcaacaatttaaatcttactggcttactcgccgttcacgaagagggattattcggcccgttggcgagcatccttcctcgcgaggaccgagtcgacctggaaactacagttcacgagtatcgcgttacggcacaacagtggaaggaccgaatcaagcattaccacgaggttattgctatggcgctcaaagacagggatataccacgcgccgacgcccacaaacgacgtttggtcaagttgctatattccgacgtcaagagcccgaccgccaaacgacaactgttcgacaaggataatcgcaagtggaagctacaaacccctccctaccttatgttcaagcccattgccgggctccatgtaaaacctgggcggacgttagcgaagcgagcgtccgtgcgacaaagatacaagggaccctggacgcccagggaagaccagggcgacgaccgttgagcagcgtgctccattccatgtatagtgattgtaattttagcttgtttttatatatcatatttgtacaatacatcagaattttccacctttcattggacatcactggttgaatacctccaactacatagttaaaagtcttttgtaccctcctcttctaggacggagaggaagtagtattactaggccaaacgtccgtaatcacatgacaaggagtagctcggttatacatgttgatgtatgtacatctagtaaatattattgtcggacagttacaagcctataatttgtgagtagaatgatgcatttttcaccacggagtaggtaaacaagaatttaagcattagaaagaagtatggctagcagaaaattcaagaaatagcagaaagccgatacttaagatctcgggcagggtacaatcccctaatgtataggctatatcaatcccccagatctatgtctacttgattgaaaaataatgatatggtggagacaaaggtacacatctgaaggtaccttttgtatgcgcatccaatagaaaaggtacatcttgcatcagacccatgagcccgaactcccagaggagttgagcaggatgttgggccaagtgtttattttgacgtgggatacagagtatagaaaactaataaatatcgttttgaaggggaatttgaatagtgagattattttcagatagctataaaaaaaaaaaaaggccaacacacagcgctccataccatcaaccgaatggaagaggacctttcagacctcctcgacacccaccaggaccgaccgaccgaagtcagacgtcgagaccaggtcaagatcatcaccactccctagaccgaaacacagacactgcgaacagcacgcgtgacagtcgaggcgggagtaaaaaggtttcactttagggcatcgaggacatgtagtcatcagcaagggtggagattctgtggctcttttaaagagtttagaaaggggacgtctactctaaagtgattctttgaactgtgaaaaggtcagcaaaatgttcgatcacagtgaaaaaatggttttctgctgtatgggggggaagaacatacgtagagtcgcttgaaaaagagaagaaggtctgggggcttgggcttctttatattcctgccgggcacgctagtgctaagcgagattgtcgtgtatttgtctggtttgtctggtttgctttgtagaggaaaggaatgttagcaaaaagttcaaaatgccatgtccagtgaggaaaaccagaaggtttcctgctgttgggggggaggagaacgcacgtagagtcgcttgaagaaaagaaaagggaccggggggatggcggcttatatagcccagtgaaaaattattttctgactcagcacggcacgtggtacccgggggacgcgctttcctcgcgtgcaacttcacgcgttccactttagcaaatcgggaaatcccaatcggccctccactccctccttcctaccacactatattgcatcacacaccatggacggtttacaactacgtgatgaggccgcgcaggatcgcgttcgtgctgcaactgaatttcttgaccctagtaagtccattgagttatgtgttgtgatcccttgagctaacaaagttctttttttcagatgatgcacgggcacgcaggttcgtcgacctcgaagataaatgtgaaatatatatctaacgggctggaacagttatcgagcggacattgtggttatgctgaacaagggtgcgcgacgattgacagtgcgtggatctgcgaaattccctgctagtaggtgatgctgatgattttggacaggtcagcatcgatgatatcagagcacataatcgggagcttgccgatgggtaaattgttcctcgacaccaaccgaaaccgggttcaccgactaacgggtataggctcctctcttcgccgttcgattattcacaagcctttgatgcagctttgaaggcggtcgttaaaaccctacccggtcgaccactcaaagaatcttcagatgaagcggtgtgtattaggttctcaatgattcttagcagacatggaacgtctaacaatatcaatagaactactactgcgcttatgttggtgcattcggagaattctcttgcaatccgcgcacattgggctcggaacaattgaaccacatggtctcgctcgagggaattgtgacaaaatgctctctggtacgccccaagattattcaaagtgtccactacgtcgagagaaaggatcggtttgtcgccagaaaatatcgtgatcaaactatgagtgccagcggcgcaactagtttgaacgtttacccccaagaagacgacgaaaagaatccggtgagtttagcctggacaatctcactcaatcagttgaaactaatgatagaatatctagcttattacggagtacggctactcaacatatctcgaccatcagtcgatctctatccaagaaatgcccgaacgtgccccggcaggacaattgccccgaagtgtcgatgttatcttggacgacgacctcgtcgacactgccaagcctggtgatagaatccagttggtaggtatctaccgtaccctcggcaacggaggtagtggctcgtcgacgttccgtacagttgtcatggcgaacaacattgttcagttgtcctcgaagagcggtggaggtattgcggaggctgtgcttacggataccgatattcgaaacatcaatcagattgccaagaagaagaacgtgtttgacttgttgtccaagtctctggctcccagtatttacgggcatgaccacatcaagaaagccatcctcctgatgcttctaggtggaatggagaagaacttggataacggaacccatcttcgtggtgatatcaacattcttatggttggtgatccgtccactgcgaaatcccagcttcttcgtttcgtattgaacaccgcgccactggcaatcgcgactaccggtcgaggttcctccggtgtcggtttgactgctgctgtcacctcggacaaggaaaccggcgaacgtcgattagaggctggtgctatggttctcggtgaccgtggtgtggtgtgtattgatgaattcgacaagatgagtgatgtcgatcgtgtcgccatccacgaagtcatggaacagcagaccgtgacaattgccaaagccggtatccacacaagcttgaacgctcgctgcagtgtccttgcagcagccaacccgatttatggccaatatgatccccacaaggacccgcataagaacattgctctccccgactctttgctttctcgtttcgatttgctatttgtcgtgaccgatgatattgaggatgctcatgaccgaataatctcagagcacgttctacgcatgcatcgctaccgccagcctggcactgaggagggtgcacccgttcgggaacagctcaatcaaacattgggcgtcggaaatgaagatcgtcaagactccaacgcgccaagtgaagtttttgagaagtttaatgtgatgctccacggtggtatggtcaacgctaccaatgctggccgccgccgtggcaaggatgtggaaattattagtattcccttcctcaagaagtatatccaatacgccaagaagcgaatcatgcccgtcttgaccaggggtgctgccaaccacgttatcgctgcatactctgctctgcgaaacgatgaactcaccggcaacaagcgtcgcacatcgcccatcacccctcgtaccctggagacactgattcgtttgtctactgcacacgccaaagctcgcctgtctaatcgagttgaggagaaggatgctaaacatgccgaggccatcctgcgcttcgccatgtttaaggaagtagtcgaggatgagcgccggaaaagacgcaaggtgaccaccttcgatgattcctctgacgacagcgatgctgaactcgacgacaactctgatgatgacgccaccgcccgcggcacctcaaccgccacaccgggtagacgtactggcacagcacgcacccgcggtatcgcaacgcaatctagtggtcctgtcccagacgaagacgaagacccagacagcctatacacagccagccctcgcgctcaacgcttgcgttcgagccagacagctcgcactcaaacccaaaccgactctcagatgtcaatggcatcctcaaagccagcctcgcaactcatcgagtcccagacagactcgcagtccacttccacagacgtcccgatcacccctgcccgcatgacagtgttccggcagactttgggcccgcttatgggcaagactgtgtttaaagacagcgatacaagcaagattgatgagttgattaatgctgtaaataccgccatccgggaatcgcctcagcttggcgcttcgcacgtcttctcccgccctgaggctatccaggccttgcgagtcatgaatgacgacaatatcctgatgtatctcgaggatgatgaagatgtgtaccgggtctaatttacctgggttatgtggcactgtctatacttctcttctccatctggtaatagccagggggagaatgctggatctgtctgcgtccagttttacgagcatgctttcttgcctttgcattgggattgatatcagcatgttttgttttattttgtgtttggcgtatgggatgggtttgtgaggaaatactactgggtgggctcaatacgagaaatatgaatgaatactcgatccttgacttaaatcaagacctgaatggtagtactaggctcttagtccacctgcaattgtaatttaatgccacgctatgtgatttattagcagacacttgtttatttgacactataagatgcattggaatgggagttttccaaaggaaccagatacaacgcgacagcatacataggcgaggtactcgagcatgtctatagaagtaacgacatcgcgctctaaaggatatgcagcatacacagctaatgcaagttcccaaagacaacgctttgagcaacaatgtctggaaaacacgagagacaaaaaacagggtatagagatataaatggcggaagcatgaataatattccgtgctaaggtgcggtgcagtattacaattccggaacagaattcggtatagcctcctctttatctttctcaagcatacccataggcaacacagagtcgtcagacgagaaggacggggtacgtataccctctctgatctgcgcctgcgtgagaggtgacaagccccgccgaagcgtcgagcccttccgtttttgctgctgcgggctcgcatcctgcccggaggcggtgctcccgcggcggggcctactggaaggggaagagcgggaggggggacggtcttcgaagctcgtgtcgacgggggtagtgctgcgggatgacgtgcgggaatgagactcggagcgggtattgcgacgggagggaccccgctgctcttggccgagtttcgtgatgggatgatggccgtggcctgggcggtgttttgattcttgctcgagtgagcggtgcagggtccctgcgacgaggcggcgacgttgggaggcgcgccagccaagcccgagccggccgagccagcctccttctgtttgggcgaggtggcgctcgcgctcgcgcagtttgaggcgtagctgggcgcggcgctcgttttccttttcccagaagtcagtgcggtaatcgtcccagttttcgcggaattctggggagaacgacttgggcaggaggaggagacgaatgtagtcgcctcccgggctgaggtcttcttctaccatgccggactcgctgtcggtgccgttgtagtactgttgatagtgctgccgaccaccaccagcgcgcttatcggaggggctctgctcaacaaaatggtagtttccattgggggagggtaagaacggggcggagaatgggaacaggaatgagatgtaagacagtagctcttgccagaaggggccgcgaatgataattatcttggtgttcatcacgcgcaggccacgattggagacagcgagccagcgccgaggccatctgatccctcgttcccactgccctgtaccccagatgagcagtgcggtaaccaccccgccaagcagggcgactttctcccccatctctaccacccagtagacagagccgcctaccccgcggccatcttctcgcgggcgaaggaaaagggcatatgcaaaatgggcaagccaagcggctagtagaagtaggaagaacgtgttctggcggcgacgctcgcgcagggccagatattgggctcgtagcgaggtttcaagtattaagaggtttaggtagatctggggcggggaggatggcaggtgtgccagcgggtctggggtcgacggacgtggaggggaggaatctgaacggtgagcttgagacgaccttgaggagttcaacggctctggagttgatggggcgctcgcgccgggtgttggggcacccttgaccacctggtctaagggtgaggccatagtagaagagtcccaagatgatagtagaatatgaaagcaaagctcgttggttaaagtcaaatcaaaacttggccgatccggcccagggcgagtgtcattagtgtcattgcatgtgaagaggagagagaaaggcgggagggtgaaagccaagttggatcgacatcatctgcccagttagttgacttcacttttatacctacacaaatattgcccattgccattaacttaaggggtttccaccatatttgtcttttcatcgactctcttccttcggatattacctcttttgcccggagtttcgcatgtcagacctaccggggttaagcggagtgaccgaattgtctccgcgttccctgcttatacgtccatgagcgccaccgttcaacttttgctagcagaaactatctgtcttcccaatttgcgaatcgcaggcacaacttcgcgacttgcttctctcttttcagccactcaacaccaggccaaaccttgctcagccgtcttcgccaccctcccacgggggcacagactgtcttcaatggcgtcagaatcactcaactcgtcccatgagaacgtccatgggcgcgatcaacacttaggtgaaagcaatatcgagagaactccgggaacgccatatgcggctcaggctgctgctggcgcggcagcggcgcgtgcatttttcccgttgggatatcgagaaggctttagtcaatgggtaagctaacaattcaaaagccttccattaccgcatgtctgctgatgatttgatttacatagtgggctcgtatacctgcagctactgccgaacacaaagtcctctcttatctgccttacttgcaccaccagccccccacccacctccagactggaaaaacggcagagcttccggatggcactatcccgaccagtctcgagagcgcagaccctaatcaactggatgaagtcaccactaattcccttgatgacccttatggccctcgccgctggcgctctagcatggtagaactgagcgggaaagaccgtgcgctcaatgagttctcggtggagagggttggcgaggaagcagaccaacatttggtcatgctccacggctatggcgccggactcggtttcttctataaaaacttcgaaccactgagtcggttgaagggctggcaactccacgccttggacatgctaggcatgggccggagtactcgaccctcattcaaaatcaaggcaaaggaaagagaagacgctatcagggaggctgaggcttggtttgtagatgccttggaggaatggcgcatcaaacgaaagatcgatcgctttaccttgcttggacacagtctcggcgggtacatggcggttgcctacgcgctgaaataccccgggcatctaaacaagcttatcctggcatctccagttggcatcccagaggacccatacgctgtcactgcagatgtggccgagcctcgggcatcgacattgtccaacgagcttactcaagacgagcgagatataacttcgtccatttcggaaacagcaccgaagacaaccgacggtagctttatcactgggcgccaaccactcccggctgattccgcaccacctccagctccacgacggaatctccctaagtggttcgcgtatttatgggatgccaatatctcgcccttcagtctggtgcggtgggctggtcctctaggcccacgtctcgtgtccggatggacctctcgtcgtttctcccacctaccagccgaggaagctaaggcactccacgactactcgtactcgatcttcagtcttcgtggtagcggcgagtatgcgctagcatacattcttgcccccggtgctttcgctcgtagtcctctgatccaccgtgttcacggcctcgggagacaactgatccaaaacacaagcccccttgctcatccagccgccgccgccaccacttcgtcagcgccctctgagaatacgaccgcctctaccgccactccttcgtccgactcttcggcacctgctcggcgcgagaagggtctccctgtggtgttcatgtatggcgaccacgactggatggatgtctcaggtggtcgtgcagcagcagctatattggaaaaagaaaagcggaaagccctagaaaatgccaccccagaggagaagcgtaccgacgaaggttcctctaaggtggtcgttgtgaataaagctggccaccatttgtatctcgatggctgggaggagttcaatgatattgtgctcaccgagatggaagaggtcaaccagagggagagaagtcgtcagtaatgacgtggataaggcttctttccctttgtcgtgaacaacgacctattaaatttagagctggagtgtgatgttaaccttcgtccctcgtttattgtggtatttaatctctcttttgcccctcgtgttatgtgcctatctccctcttttccgtggctataattctgtacggtgcatattgactagatagacttggacagaataaatgacacttgccatgaatgctccagtcggagaaacagctttcatgcatttttcatttgtgctctttgcgcctcccccccccaaaagaaaacacacttcattcagctcgatcaccagcagtcagccctctcgaattcagtccaggggtactttgtctccgatgcctagggctagtgggataatgtgccatcaagcgtgctagccccaccgatggagcatcacgctcttcagtcgacagaccaatcccgggagtagtatacccactagcattgggactaaccctgccggagagaatatggctactagaggacccagggcgcctcaaagaaaagtacccacccccaccaaagctcccgccactactattgctcccgaagctgtgacccagcccatccccagaggtggagagatatgagctcgtgaatggtgcatcgctggcagggaaggcgcgcgggagagcccccgactgagaatacgagtttgaatccagccgcaggtatggctggggcgtcataaacggagcattgagtcgcgctgttggtgacatcatcgactggctgtactccctcgaattaacagcggcggtatcaggcctgtttgacagcgctagggagagtcccatgcccgtgcgacggtcagaggtcgttagcgatgaagtagtgagcgaacggcggtggtgtcttgacccgtcttgttgctgatcggggtagatgccctgcgaggcccttgctcccgtcggcgattggagattgcttcggccattacgccagtcggtgctttcggggctgtttagggtgctttcggcgtggacacttgtacataacatgacgagttgcgaggggagctcgagacggttatttagagatagccaggctcgttcgtctgcatcaatgtctgcgtctagatcgatgtcaccggtgctatgtatcgaagaggacgaggccgagcttgtcgctttcccgtgcagagtatgcgagctgcgtgttttggatgcagggtatgagcgccatccaccgacgccttcgaagtctcgcctttcatcgccgcttacaggcaggccgcagatgggcgttggggtagacaagttgtgggcctcgatcatgctccgtgcataagagttccttttgcggttttctgggtcatctaaactgctaccaatggaccaagaagtaagagggtcatttatctttcgtgaatgtgtcgtcatttggctggagttccttcttgatctactactagctggagtagtaggttctgatgccgcaaatgtcaataatgatgaggtaggtgaggttggcactgaaaagaaatgcatgaacaattcgtagaatagctcaatacagactactgatagtctgagtatcaatgcaaagagcgcagcggatattgtaacccatgctgagaaaatgagtgggatagagatgatggccaggacaggcagcgcaagcaatgttgatagagagggccacatcgaggagtcaatctatatctccaggaagtggggaaaagaccaaaagcccatgattatacgacattcggtatttaagaccacagtcatagcataaacaacaaattgcggagaaagcatgtgatggatgccccaggcagcacaaacgccaattacatcatttcgctaacttcaaccttgttgtatatcagaaacttagaatctagctttggaggccttgttctggtttccattgaatagcccgagacatgccagaggatgagccgttcccttgggacattggcgtttacgatgcccactgtcaccccaccgacacattggcctcagtggccgacatcccgcaaatgaaagcgacaacactgacaatcatggccacgcgcggggaagatcaagatctcgtacaacaaacagccgtgtcactgtcagccaagacaagccaatcaatggcagaccgcgtagtgccctgcttcggatggcatccgtggttctcgcaccagattttagacgacactacacaaccaacagctgcacaaaacccagccgagcacaagtccacgcactatgccgccgtgctagcaccatccccagccgatgaccaaccatttgttgatttacttcctgttcctaagcccctctcagaactaatatctgaaactcggaaccgcctccaacagttccccaatgcgctagtcggcgaagtcggcctggacaggtcattccgacttccgagcccatggactccaaccgacctcgataacagagatgaccagcttacccccggctcacgagaaggccggcgtctctcaaactaccgcgtcaagccggaacaccagcgcactgtactgaaagcgcagctacagctagcgggagaaatgaaccgtgccgtctcgctgcacagcgtgcaagcccatggcggagtctttgaagtgcttaaggagctctgggcaggacatgaacgggttatgctgtcgcgacggaagagggacaagcagcgggatgcagaaggcgccgtgtctgacgacgatgatgatgacaatgacggagataagacgttggaaggatgtgtgtcgactaaagcatctattcccaaagggaaatcgtatcggccgtttccgcctcgcatctgcatgcactcgtacaccggttcggttgagcccattcgccagttcctgcatcagtcgaatccgtcggatgtttatttctctttctcgaaacttatcaatttctccggtgctgctgagaagaaggttggtgatgttatcaaggctttgcctgaggatcgcattcttatcgaaagtgatctccatgttgcaggcgcgcagatggatgagttgcttgaggatgtggcccgacaggtttgtcagctacgtggatgggagttgcggcatggtgtacaggtgcttgcagataactggcggcggtttgtgtttggctaggtcttgcgtttcattttcctattcctgcatgggttgagcatgggttgaatttctgacttgttgcactttcccctcgcggtttttctaagcggtgcaattagcgaacacgcatatatggcgcgactggatcgctcttgtacgtatatccatggatattgcctaggtaattcattgagacataaaaaggccccaactgatttgacccaacatcactatttgcagttatatgacgtggtatatctctatcattgtatgtgattgtttgtgacatggtatcgtaggctgggcctgtacatgtctgtggcctgacatggtctctaagatgtatcgtgtagctgcgtgccctggcatggctcgtctcgtcgtcaaattagaaaaggtatccgaagagtaggcgatggagaagatgacagctctatatatatagtcatcaaccagaggtagcgggaaaaagctaattatgcagccatcctccatcgtgaataagatctgccatcggggcatcctgccagtagatctgccgccattcatcttcaagctcgggcaaaccttcaacgcccacagggggaggtaggtctacatcaccgaaggcgaacagctgtcgccagtccggatagtcgcgagctggctcgatggaatccacttgcatgctggctgaaaaaggatcgttcctttccagcgggccaacattaagccggagaggggcaatccaattattaaattgagggttgggttgtggtgagagagtcgtttgttggagaggggtagattcgggggtgggcaccccgaaagagagtggcccgggggtttgcatggtaattgatggaacaggagaggtaatgggcatcttgtgcgcatgatgagtgtcgttgaacggcttgggtcgttctgtggttgccatccgaagatcctcttgcagacgtttggagtcctcgaagagtcgcaggattgtaccagcatgaacccagtattgagctaattcgcgcagcgagtaagaggcagaatcgaagcggcgtaaggcattgatggcaagaactggattggagaagcggagctcaacccggacttgaatcatggccgtgaagagggtatggacgccagtgtaccaaaggaacttcaagcgctcgtgcatcctgagctcttcaaatattgaggctataacccctgcggctgcactgcaaatttctgcatcgtgagggccatagtcatcagaataggccgaggctctgggatgaggccgatgcaacagaatgaggaagttgttgtaggtcaaatggagcatagcggaccaaggatccatatcagatgcgcgaagccgaagattatcaggaagtttcagagaccaggttgccaatgacccatcagcttcttgaagaacggcctttcgccgttctttactttcccgnnnnnnnnnnnnnnnnnnnnnnnnnnnnnnnnnnnnnnnnnnnnnnnnnnnnnnnnnnnnnnnnnnnnnnnnnnnnnnnnnnnnnnnnnnnnnnnnnnnnnnnnnnnnnnnnnnnnnnnnnnnnnnnnnnnnnnnnnnnnnnnnnnnnnnnnnnnnnnnnnnnnngaacggcctttcgccgttcttcacttgcccgaagtccaaatcgatcgcgaatgagatacgagatcatcgtacacagttcggtaaaatggatcacgtagtctgcttgtacaagaggaccgcaattctcaaaatcagcgagcgtcaaaggagacacatcagaatcgtctagattgctaaattgaaagttgattagtattcgctgcaatttggccgtttggaacgacttacatcgcctgaggtcggccatatgacagggaaatcaacacatcaaattggaccagaatgaaccaaaccctccgccacattcgccgatcgcgagtcacaaatctactggaaacgggattacggtgcattccaagccccgtggcgatacgggcagcggccccaacccaaaagtgagcatctgcagcaacatcatcatctgcgctgtccgaatgccacgtcaaaagaagggccgcttgaacaagaatgtcgcgatttcgttcgatgcgattgtcaaacagatacttggtccgacggaagaaaatttctttgagagcgtctcgctctactttagcacgagaaacatgcgccccaactagcaaaatcgcttgaagaagtaggactggcggaggatctgcgggatcccggttccggtattgcgtcatgaataaatcttcgtcaatgatagggtaccccggattgacatatgtgaaataagcctggaccaattcatctgcgagagccggttctggaagtgttagagcatccataagaagctgatcatgaccggtcttcatttgacgccgtgggatctcgttgctcgcaaaatggtatacatcgtcatcttgttctcgttgttgtcgaaacaagaatgacatgttcgaatgttcgtgtccgacatagaaggcgcgcacgcctctttgtatctctctcctgccggattcctcctcgtctatcaatttaacgagatgttgctccatctccgtgtgtgcctcgcgggcatgcgccatatcggggcggccaaatgcctccgatcccgtgccttgctgaaatccatgttgcggaaggcccccagatattggtgtggcatggccgctctgaaatgcagttggaaaacttggtggtagtggtgtccccgctgcaagggtcgggtttgaagtaggatcggaggtgggtagaggccgagatcggatcggaacaggatctaggattgagcgtacagcaagacgctttttcttttcgtgtatgcgacagtcagcctttccagaggcgcgacagttggtacagggtgttccgacggtacgggcatcgcagcgaactttgcgccggtgacagtggacacaagctgcggagcctaagagttttttgagtcaccggtcagcaagtctgatcgcgcaaaaataaccgatcgccgagaacaaagaacaaagcccgcatatcaagatacataacgattaagcagataaggggcattgcttaccttgtttgcgcttgctcaccccatctaccgggagcggcgagggggcgttatcgttgacggaggacatgacaggagtaccattggcatcattcttccaaatcggccacgattctgcattattcgagtcaccaacaccagtcacttcaaggcatcatgggcgaacttcgaaatggttgccgaggataatgcgacaaacaactaaatcaagaaacaaaaaagtcgggaagttgaggaaactgcgggatcggggtctccggtggagactcacgtgggtgcggagaaggcgattatgtaaaaaatgggccaaatcttggaaatcgtatcacaaggtcatattcctccttgggagttgcattattgcatttgatatatcgtgttctccgttaatgcaaggatgtcttcatcttttcttaggatatcgctttggtggcctggatactactgttattccttcggcccacgatgtacatatttgcgatacattacggtgagccacagcgtcgtaggcaagcccgtgctccatgtgctcttcttgaccagatgaccaagagacactccacatctatcgcagcaatccaacattaaccaaaagaattattcaaggattcagcaatacccacttggaacaacatctctcccgtcctaacggagcaaacctggacggtagctgttattctggtggaggtcttcgtctatctctggctatctctgatacgcagagcctcaatgaatgtctaagccacatacccgatcagtctataaaccaggcacatcaagatgaacaataaaccagatgaacatattccctaaacagaacacctatcttaacctctggcttcaattcaagaatgggaaaggaaacaaacgagttcaagcgatcgagcaaaaatatctgtagatctctcacaccgacccccttttatccaagtattttccaacggttttagatctagccaatgaatgctactagggatcggacagcaatgcattcattatacggagtacggaatacaacatacggcctagcaaaacagataggaaagaaagaagaatatacatacggagtgggtcctatcacctactattggtgcgccacaacactagatgtgccctaactcgaacccctgaagatctacgaggctcgtacaacatacggagtatatcggcttcacttccttccggttgctgatctctaccattattgatctctgggctgacatcttcctcgggaacttaaacaagaggccttcatatacaattgtactatgtactgactggatcaatagggcagcattttacgcacggactttatgccagctcagctcttggctgccggcacttgatttaggatttgagatatttgcccaatactaattctcagaaaaggaattagattcataagcggtagtatcatactccgtacaccgtatcccctgttcgctctaattgtgaaggggtatttatctataaggctcttttgaagactggcatgtatgtcataaaagctaatcaggtccaaaactcaaagcagcgtcttgagtgtatgttgtaccgaggcatttcgacctacttgagttgcgcccaagctattcccaaaaatggcgaggctggcagccccatcgggttgcgaaagcttctcgttcttggccattaattacctctggacaacacccctgtgatctacgtacacaaatatgagaatggatacatcaaatgttgtataactacggagtactactacggattatgcactccgtatgagtacataactagttacagagcttagcgaattcctggcttagctgaacagatgatattactgatgatcgtgatggatataacgcgtaaatactgttggactgagtgttctatcttcacttcatatgagaaatggcacttctctgtgtgtatgaatgggctgacatttggtgcactatcactttggatcctcgtccattttccagcttgagtgctatttgatctcaagctgccggatcgcttacgggcgatattttctcagaacctattcactttgatacttccagacaatgcttccaaaattatgtatatagcatgagcacaccaaagagacactagtattgaacaataccattaagtctagcttgtccttccagacctgccttcataatcataccgaagatctccagatctttcctagcatccttcgaagtggttttagcgggcttaccatcaacagcaaatgcataaagctccttcatttccaatgtataagcatcttcgtacgtcttccgaaccacagactcacgaaatgagccatcttccaacttctcgcgaatgtgcatagtggtaggcaaccccttgacgtaaggcgaatcaaagcagaccttgacagtcttatgtccaccaaagacctcaatcgacgcatcgaaacgggggacatcatcaattccggactcataagacacagcaaaagagggatattggaagagggcactggagagggaaaagaattagcatgtttcccggagctgtagatataaaatttgcaacttacctccagaatgggggtcccttcgcagagcatagagaagcaccaagcacagccgtcggcataccaagagcctctctcattgcactaagatcatgcgagccaagacttcccaagtgcctccactgagcagcagtatcaggcgtaactggaatccccaattccgccgtcaaagcctgttcaaggaactcgtccgtcctcgtcgacaattccttcacgtcctctgatctgtaatcagagaaaaccttaggaaacgtaccagactgaccaacgaagtccgagttcgggccgacaatatctcgcacccgtgcatagcacacttgatcaaagcttcctatctccttgacggcatcgatgaagccactcgcataccgccgcatatatcccaccatgacctttccggaagtttgcttctcaagctcgatgagctggtccgcgtcttgcagagagagggccacgggcttctcgacgaagacgactttgtcatgtttcaggcctagtacggcgtggggaacgtggaaggcgtcgctgttggcaatcatcacaatgtccacgtccggggaggcgcagagctcctctgccttgcgagtcgtcttggggatacatccaatgaccttcttggcacagtgctcgagcgcattgtcggagacatcacataggtaggtgacttggaagtaatctgagaggaacccgagagttggaatgtgggcaacttgggtgatttcgccacatctagttggaatatcagcatcaatatggtacagcactttggcaataggcttcttacccaattattcctacgcggaggatccttttgccggtgttcatcttgaatgtgtgaggtgattcccagcttccccaatgacgtaatggttagggaaccttggaggttccaaggttgaaagctgattcaaacaaaagttcaaaaatttttgtgaacaaccaatatatcaggttggatgtctcgaatgtttcgaatgtttcgagtgaatatgctgggtaagttgaattgaagaagcgctgatctgatgccgcgaggtggaacagccccgccgaactttgctctcagacgctttttattagcacattggttgaatacgaataacatcaacactaagttcttgacaataagacatgtagtagacaagcaatcttgaatttactcaattagaatgtacaattgtagacttgtcttggtcctatactagacgccctggcagatcaaacccactaacttcaatacgtacttgttaggagtcaacttttggagacaaagcacaagtaaacatatcaatttcttgaaaaaggattaccttgaagcagacaaaaggtgagcatcaatcaaatctcaaaaaaacatgacctatcagcataatgacactggtcatcacagatctagaagctaggtgttatgatatacaacctcggtcatttgttgtcaagtcaggatcaaggccaacatccataagtatcttaagcctacatcgatgtacatgcatatctagctgtgtatgaaatttaaatcgttgaaatattgactagatggtgttagttaaccatcaattatggctttcttcaagtcgtcctgggctgatacctgcaaaacccaagactctgtcatctgccatcactgagctttgaggaacccagccgaaacactcaagattgggaacttatgggtatatctcttttactatgataaggagctaatcttgcaattttgacttcgaagcacacaccgacgatgcattatgtcttttgccgttcccagtaacgccggtaacctattgctctcacacgcagatagctacacccaggaacatgtaacttgaaagtatacaaagaaaaggaatgccactaaggctgcacaacctgaatgttgtttttcttctgcaaagtgggagatcaaagttagtattccgtatcaagtttccagaatatggtttcaggcttagaaatagccatgaaacaggggatgcgattaccttccaggtatccagctcatcctgctttgatttgtactgcttgagcatgtcctcaatcacttgtctcaacccgtccgagttggtcttgagtgtaggaagcacatctttgacagtgcgctcaactaaaacgccattcaccaggcgaaaacatttgcggtctgcggcaagagggtcgagggtttcaatcacaagtctaaaaaaaaatagatgttagcattgtacatatccgttgagacatctctggttgtgctcgctcgtggtgaactccccgattcatatcagcgagaccatgctgggatagcgcataaccctggaagtaactcacttgtgttcttctgcttcctgctcaatatcaccgatcttttgcgctaattgctgaagggtatttttgaagttggtgtattggtgctgaagctctagattgagggggttcgcatcagctttcgtgaactcttgaggtctgcaggggcaatagaaaaaccataccttgctgcttcttagggtcaatctgtttctggctagacatgatggctgtttgatatggcgtggtcggcacaaggaagcttgagaaattgggatgacgatgcggggcggttactttttggtgttggtggaagccactactatggaactttatgcacctcacaccctacataggcactttagctcagaatctcatatatgtatgctcaaatacccaagacaactccaatatcattaacagaattcttggtttaactctatactaccaattatatgctcttcatgaactaagttatataccacgtgactaatattgcagtgcagtgacaagtcgatcagctcgactccaccgtcctctaaaaaaaggttgcctcgggtcagcaaagctgcaaataagctgtctcctcgagaatcagaagctaaacactgctaatgacattgccatttcagaagattgcctaggtgactaccagggcggtgactcttctctggcaataaagggcggtaagaagataggaaagagcttcgactccgcggatcactttctcaagtcaacctcacgcagaccacaccgagtcgtacattgcgaataactcaagtctgaaacctggctcaccagcccggctgaacgacatgtctcgcaacgagatgggccctccggccaaaaggcacaagggctttggacacctccctgcaggcctgcgcgacgcaaaacggaaggacattgacaattgggaaaccaatcgaatgcttacttctggtgtagcgcaacgacgagaccatgagggcgacttcatgcccgaagatgaagaagcgactcgcgtgcatttactcgtccacgatctcaggccgccttttctcgacggtcgtacgatcttcacgaagcaactggagccgatctccgctgttcgagatccgcaaagtgacatggcggtattcagtcggaaaggaagcagggtcgttaatgagcgccggcagcagcgagaacgacaaaagcaagcacaggaggcgacaaatatggccggcacagctctggggaacttcatgggcatcaaagaggacgaaggagacagcgctgtcgctgtgcccatcgaggatacctacaaaggaggaggaaacaaatttgccagacatatgaagaaagacggtggctctagcgctttcagcaatagcaagaccatgcgcgaacagagagagtatctgcccgcctttgccgtgcgagaggatcttatgagagtcattcgggataaccaagttgtggtggtcgttggagagaccggatctgggaaaaccacccagctaactcaatttctacacgaggatggctattctaagttcggtatgatcggatgcacgcagcctcgccgtgtagctgctatgagtgtcgctaagcgagtcagcgaggagatggacgtcgagctcggtggactcgtcggatacgctatccgtttcgaggattgtacgagtgacgacacgttgatcaaatgtgagtttcttctttccgctttggtgtgatcatatagctaatttatgtactagacatgacggatggtgtattgctgcgagagtctctcacccaaaaggatctcgacaaatactcatgtatcattatggacgaggcacacgaaagagccttgaacactgacgtcttgatgggtctccttaaaaaagtcctgacccgccgcagggatctgaaattgatcgtgacctcagcaacaatgaactctgaacgattttcgcgcttctttggcggtgccgcagaattcgtcattcccggcagaaccttccctgttgatcttcacttctcgcgcacaccctgtgaagattatgtcgatagtgcggtcaagcaggtcttggccattcatgtgtctcagggcgctggtgatattcttgtcttcatgactggccaagaagatatcgaggcaacctgcgagctggttgaagaaaggctgaagcagctgaatgatccgccgaaactcagcgttctacccatctacagtcaaatgccggccgagcaacaggcaaagatctttgagaaggccgccccgggcgtgcgcaaagtaattgtggctacaaatattgctgagacaagtctaacggtcgacggtatcatgttcgttgtggatgcaggttactcaaagctgaaagtgtacaacccgcgcatgggtatggactctctccaggtcaccccgatttcccaagccaatgcaaaccagcgatctggacgtgctgggcggactggaccgggcaaggcctatcgtctatatacggaaacagcctacaagaacgagctttacattcaaaccatccctgagattcagcgaaccagtcttgccaataccatactgttactgaaatcccttggtgtgaaggaccttttggacttcgacttcatggatcctcccccacaagagacaatctctacctctcttttcgagctctggtcgctgggtgctctggacaacctgggtgatcttacatctctaggacgtcgcatgacaccattccccatggatccccctcttgccaagctcataatcatggcctccgatgtatacgagtgcagcgaagaaatgttaaccatcgtcgcaatgctttcggttgcaaatgtcttttatcgtcccaaagaacgacaggaggaagccgattcagcccacgagaaattcttcgttccagaatccgatcacttgacccttctccacgtttatactcaatggaaaaccaacggtcactcagatgcctggtgcatcaagcactttttgcactccaaaacgctccgccgcgccaaggaagtccgagaccaacttcacgacataatgatccaacaaaaaatgcccctcgtcagctgcggtacagactgggacttgatccgcaagtgcatctgttcgggcttcttccatcaagccgcaaaactaaagggcattggcgagttcattaacctccgcaccagcgtgactatggcgctccatcccaccagtgccctttacggtatcggccaagtgcccgagtacgtcgtctaccacgagttaatcctgacgtccaaggaatacatgtccacagtgacagccgttgaccctcatgtaagttaccactcccccattcatgcctgcttgtcatctagtactcaactaactcgtttctctcagtggctcgccgaactcggtggcgtattctactccgttaaagaaaaaggctactcgcagcgcgaccgccgcgtgacagaaatcgagttcaacaagcgcatggaaatcgaagagcagatggcagctgaccgtgaacgtgctgctgccgagaaattgcgcgagcaggaacgcaacgacccagcccgccgcagaacggaaatcgaggttggcggaaagtccgtcgtgcgtaaagctatcatcaagccaggacgcagggtcggcggtttgactgcttcatcttcatcttcctcgcgacctggagccaatatcgatggcgctcatgatggaggtggaaatcgtcccggaagcagtgtggtcaagaggcctacggtgcctcggagaccaggacgtgcattctagtcttggtcttggagtgaaagtcacaatttctgtcccctaataccccgatagatgtgctgtgcttgaagatccgtacgcctcacgtccactctcttctttcctctgcctgaaatcctttaggattttccaaatatattgacctacggtcttacgtgttgatcttgaatcacatttacgaatatcttacgacgtggaacgatgcgactaagctagtttggattgtgctattatgacaatccagccagctaagttgctgctagtcagttctagcaataaaagaatagagacagttctctgatttttttgagtgtatactcatttccctatgtaatcctaagttatcacgtagtatctaatagagaagctcttagagcttgtattcagcttgcttttggagcttgcttctgcgaaatatacttctaggcaggatctttgtcgtcatcacttgtgatatacttactttctctaatactccctttatcgtttgcattataatataacaattagtctaatattcgtttcttcttttacatccatctacatggaatttgttcaatcgatacccgatattgagttatcattcagctcccttccgagtacgctctgctctttacacccagctttctccgaggtagggccatatgaatagcatacgcttatccaacaagtcagccttgtgtaagcagataggtcaaatatgaataaaattttccacttcgatcaaagaccagcgtgaagaaccagaacaaggatcggctaaaaaaggtgcaacatggaaggatatctaagagacgacattccccatcccatcgggggatcaaaacgaattaaacccagacaggaaacagaatgagccagcatggtacatattgaacagaggcttttagcaccgggcacaactcagttgataaagttgacacagaaaaagtgtaggatcaagcttccgaagatgtaatcggcgaaggccctggaattaaagatcagcatatgcatccatcgtggccttggaaaaacaatcgtgaagctggatcaccacaaaaaacacaaaagacaaaaaggaactcacctttcatgtgaaatacccgtcccctgttcttcactctcatctacaaagcgcgcattcttccccttagagctcggctttgatccagaaccagtaccgctgtcactagtttgcatgcgcagacttgccgtaaggacgaattgaccaacagcagcactaaagccactgaggaaggcattgaagggctatatgggagggaacagttgttagttattggtatataaatttccaattgcaaatcacatgccgtatagacaagacaagggaaaagagggtgaagaaaagcaatagaaacggaatggtatttgcacttacatagttcccagctacaacacagtacacaaactgcaatccaccaacaagaaccaggaatgccatgaaggcatctaggaggagtgtccgctgcggcgttgtagatgcatactgctgccagacatgggtagcaatttcagcggctgaggcattggtcttgagggttgttgggcctgaggagagcttcggtgttgtgagtgcgggtgtgggcgtgggcgtggaggatgccgcggaggtagttgaggccgcgtggcgcttgggagccatgattttgggattagacggatcggtagtacttggttatgtggagttgtcgttgaatagattatagatatcaccgatgaagattttactgcaaaattggtgcagggagggtgggttggaggacaatggcggagtggaaagtggtggttgatgccagcttggagcttgttatcaccgtagtcacgtggtggagtagatcccgatttggaagtatacaatcaagtgataacgaatagtctattttttcgatgatttaatggtaaattcattgactgaggtattgagattacgttttcgattaacggttgtgtaagatattggatgtacagtgttgccacaacacaacgtcgccgatataatgcgtaagagagaagaggaatataataacagtgaggggaggggatatcaataaccaacgccataaatcatcccatcattaatagaaaaggcctcaggtgagaaatgaactaccatatatcaagaggctaagcaaaccattcggcaacattaccgttggttggcagagaatcgtcattttcaacatccatctggaaatcacgcatgacttgatcccattcctcccagttgagctgagtggtgtcaggaaggggagcctcattcaagaatgggtttatcatggttgtgttgtagggaaggcttgtgggcaagctcggtgccgagatattattctgggccggtggagcatcgaatatatcgtttgaagtagctaggatgtttatgccagggaacatatttcgaagagcacccaatggtccattgctggggtcatagtctgtatcagatgctgttgagcctggccgatctatcgagggcgaatttggcatccctattggcatatgaatccgcggaagagtatgattatgattgatgctttgaataggctctgttgcggtggggaatggtccaaaactggatatcaattcttctttgtgcttggaccgggtggcagcagctcttttcatcaaggcggcgagcggccgccacagcatgcccttcttatgtgtggcctgcatggcccattccgtgtagatcgaactgacagcgctccaagctcgatcggtaatagggcaaattggtcgtacgcatacctcggacagaacaaatgcgattccatgccattgcatattggtccggaacagccagccccatttggcggtcttgagatcagtttcaagcaagtggccaaactcaaggacctcaattgcagtcagaaacaagctctctctcgttgcttgtgacacatttccacgctcttttcgggtcattgggtgatggacgatcagccataatttagcaaggatgagacgcccaactgtggcggtgcaccactgcaggggaatgttcatatcacagtgcttgatatatcgttgttcacatcgatcactgataatttgaatcatccgtccagcacgatctatgggcggtaaactgttaggtgaacgaaactgggctccggggcacacgtaatttgctctccgtaaagcgctcgttatctcacagcgaatgaggcagaatgtgacatccgtgaagccttctcgctccttggggggctcttccatgtcaggcgacaggtcgtcgtcattgagatttaatggcagtagagtatcgtacatgctctcgtgaatgagtgggtcggtcccatggtcttcagatgagcggacatccaatagtgaaatatgccaccataatcggcgccgcatctctgtttcatacggtttcagagcgaaattgctgccatctcggtgtaagcctaagctctgagcaaggcgtaatacaatcgatgtcatagaccacacaaatttgctatcatcttctcgtcgcacacagactaagaataagacagccgcttgcagaaggaccaagctttgtgtattcaagaacccggcttttgcaagcgcttgctctgtagcaaacctgtaccgcttgacagcaatagttcggtcttccccgaactggaaccaacagtcatcgggcttcatgctgacaatgctacaaaggtacatggaaaataccaatgcctctgaatttttgtccaaggcatcagggttccgtgctgcttgggaaaacaggtctctggcagtcggtcggtgtacgatggtgactaaaggagccacattttcctggtatgtttcccaaagtaaggagaccttgggcattggggggtgaaactctcgaagagactttgaaagcgagtagaatccaaaaaggaaaccgtcatgggaggccgactgagaagactctggtgaaggtgtatcatcttcccccgaggacgaatgatcaaggatatcctgcagctcctctatctaaaacatgttaatatgaagtacgtcgaggtagcaaaagaagatgagcgatatctacctcgtccccaagactagtccagagccgattgctgacatatcggctccggccttcatcaatgactaaccgcccaaattcattctcaaacttattgggagcgagtttcttcggatccgaagcttcgaacggacagtgacgtccgccgtcaacctggttttgtggctcagtcgaaacagacgtgggcgcagtcggctcgctccgaacggtcgaagatccagtcgtagaaggcggcgcctgagtcgaggtcgatccaccctctgtatcaccattgcccctaagatgatcaataacaccctccaaacgacgtaaccgcgaaagcaactccgcatccggtggacgtttcgatttccgcggggcacggccaggagggggaaaggtgcagtcgatgccggctttggtacagttcgaacacggggatcgcttgttgcagcggactttcctgcgacggcaggtcacacagctgcgagaggtcgagctcgggggttccgtagccgcatggcggggaaaggtggcggccaagttcggaggtagtggagtatttgaagaattataattgacgggaaagggattcaactcctctggggaagctggagggaatgacatcgcgctaaggtaaggactccagtctcgcttcccacattctttgaagtctagtggttctagcaagaaataactagcaaaaatacgaagattgtacggagtgatctcataggcatcaaattatcgcttagggccctggacgcatgtgactgattagagttccaaaggctatgactcagcgcccggtctggccccgtcccgttgaggccaaaggccgttatctccgtttgactccggactccggagatcgtatagatcgtgataagccttgagaataaatacatgcttagatagtggtatatgtacagcttctatcatcagatccaattcaaatataccgacgccagatatatgcaagaaatcaccacgcatactgaccgtcacgctgaaggtgagataaataagcacttatgcaagcaatgcgatcggtggtccgctcatgcttcgtctatgtgcgcaggagtgagtgtaggggtgttcatgggtaagttgttaccgcgtgagcctcgtcgaagcgagcgcttgaatttacgcctgtagagcatcagtcaaccatcgttagatatgatagttataaaactcacaccgcggactcccaaatcttggtctgttcattgaagatgtgactaggacagttagttacccaaactaacatccatagaatggaacaattcaggactcacccataaaagctcgttcgtgtaagtgcctttgggccatactcttcttcgaggagatatgtataagcgtatggaattttgaccggaacaccctcgaagagactgtcgcgcagcgggaagatgtcgctctcctatattacccgttagcgagactagacagacagcactaccagacaacttacctcatagtgatgtttatccttgcacattagcgcttccggatggccattcagccgcttagcctcatccttgcggacagcagtgatatcgatgaaaagaccagacgacatgtcaatccagcgggcatcaatcttattcaaagtgtctctctcggatttgacgacataatgaggattgatctcgagcatgtacgtacggccgccgtcgacgttaggaagatcgaaatgatgctctgtcatgttatagtaatccgccaagaaatgaatcgtcgcctccgagatctgcacatctagatcgtcgtcccatggaaacacctatacaactggttagggagtcaccttataattcgggatatccataatcccaccttctggttccaccaccaggccaagagagtcccatgcatgatccatgtctctgcaccgattgcgttcattgttgtgaaatatgtttggattagatccgagagatatgggatgacttttgtatctgggagactgccattggcgtatctgaaaagcgttaggcatcgcggttgggattgaaggatgagcgagcgtaccggccgtcataatgatgattgaatctgagtactgcggtttagttttgatcatatctggtacaattcccaggaagggagatgttcgacatactctgattcatctgtagggttcacgcgagtcagtaaagattcaaatcagagttccatggttcgtggccttataaaccaagcttggggttgtacacatcgacgaaaggattaaggattgcacttacgaaagtacttttctttcggtatcgcacgttcactcttatactcctttgttacattctttcgcacgctcatgaaattcggttctgtatctccgcagactccagaaatggtagtcgccaaaaggaatccatggagccacaagactctggtgactgcagagcgcattccgtactggagtttcatagaccccgacacttcatgctccggatctcaatatgtacaatgagcctagagattgtgcgacgacaggttcgacctgtgctgtccacagggagtctcttccaaaatgggtgacgtccgaggatcggagacgggataatttatggagaacaaagataacaaatagaaaagagggtataatagtgtatgaagattgaagaactggagaagggactggagaatcaaaaacgcaggagatattttgactagtagccagttaatcccatttcagcttgaatttccgccggtttttccggaacccccttatccaagagctgacgactcccatagaggaacaacccaagcgacatatccacggatcgaatcagcagagtctgcaattttgcgccacggacgtgccccacatggcaataagcttgtcttgagggtcgcgtgggcaatcttggcaaggttttgcgtgtgaaacacgaatttcaacccgatgtttcccatgggtgacgaggacgcgcatcccgctaacgctatgtccattggcgttccccaaaagaggtagcttggctgctagtagcataaagtggcgcccagaaactgattggggcatacgcgtcctcccctatcgcatcattttagtctagtggctgcccggtccgcacacttagagacgggttgagaattggtggatataaggttggacatgtatcgctctcgaataagaaatcaccttcatcggttacttcggctgagattcggttagaggtgcatctcaaagatacaggctctgccaagggcttcgggtaactcgatccgatcgaagccccactcgtccccagcaatgatctctgatgttgctgttatgggctgcagcaacgcaaaaggacccaagatctgaattgcgtaaatagaggataaagagcagatcctccccagactcgactgatcaacggcagtgagcgatcgtggctcatttcgaaacgtcattgaagctgaccaatcatgaaagaatgcccgatggcgcatgaagatagccattgtgcataacactgattgcagaaatctccgaccccgagcctcaactccgagcggtggatctttcagcttgagtccatagcagaaagatattaaaaagcgactttgcccaagctggaaagttgctctttcgattttcttcaagttctagtcttgcttcctgatgtcgactatgagtggaccgggtttattttccagccgagccaccatgcgaccgggaaggatttgaaccggtcctttccacgaaggagatcatatctgctggtacggagtagtggagtgcgagctgaatggctcgaagtaatgggagtgtctagggcataccgcgtacctccaatcgtcacttggattgaccttgaaagtggtggaagatgcgagctggccacaaagcagggcctaaagatgttcggtgtccgtctattccgcaaaccacggacatcgccgttagacaatctcacgcgctaaaatgcttgtcaagacggcataatcggacctgagagatcaacaaacagaataaccgcataaatttcctcaatgaaccagcgttgatatacttaccttcaactcaccctataaattagcgcgtgtcgaacaacacctacctcttttactcggatgttccatagggcacacttgtgcacacttgtccggcataccgagaaaatcaggtttcaacggagatgagccgagtcttcttatcacatgcttatagttgtcctctaccaccgacgccgccaacgccggtagctcatccacttggtttgtggcagtgtcgagtggcctcattgtggggtggacaacaactgagacatgcatgcagatatacagatgcatatggttgaatggctatttcatactccgtactcttcgcgaataggatctatatcccgatgatactataacaccctgttcggcgtacggagtacatagccacacgttatttcacaggttcggccggggtattcgggccggacatacatacatgttatgtcccatgttatgtcccaaggtttgaattcatatttatttccctcatccccacaaatatgaagctatggcgagagtaaaagatgcatgaaccgattagggcaaccaggcactttcgattggccaataatggacttccgattttcggtggaggtgtacagaggagcgagtggaataatgattcgctatgtttagctttagcctttcaatctccattcacggtttcgtttacaagtcgagttaactagtactacggagtatgttgtacactgaactcagccaccgtaaaagaatgtagatcacacatacacggattttaggccgagcgagatggatttccctttccgttttagtgctcaccccttgccgctttttgctcattgagtaaagctgagcacgcccctgagtattacgtaatcgttaaacccgctcactgagcatcacatgattattacataagctacaaagtacattttcattaaagcattgaaactaacttatgaagataggagtgcctcgttgtgaggtaacagggaagggaatgtggacctgcggataccctttgctttttgctttaatcgggagttggggaaacaagcagaaccatctgatatgggttggcacgtgaggaagttcacgatggctattgaaggaagaaagaaaaaaaaaagtattttagtctttctgctggacggaaggaggttggtagtatcatcgtcgtgggcattggccccgacagatttcggtctgtcaactagcaacgttactttgtacatccccgagaatgaagacatcagaagcattaatcaagcatgtgcatcattataaactcatcccggtaaaagtattcatagaacatggagcgtgattggcgttgtcataatattcattatacccttacattgctttatgcgggttactcacatatcagtccatcactcgtcttctctggctagcaaatgaggcggtgaatagaattacccttaggaatcctccaacttggaccagaagggtagtctatcttggtccctatattataggtattcccagttagaaacttttctactaatctcagaatacccaaaaggctagttctaccaggcctatctagcgtcgacttatgcctccacctggaaggcaaatgcacagtggggccacattattggctttactattctgcgcctatgccactattcaacctcgccgagctctacatagttgcggaatatatccaaccctccatttttggttctacaatatctaggaatatctcagcctagccctttcggtaatcaggttagtcagctgtgttctaggatcgtattcgatataattgagcattattttccggtgtaaggtatttacagggtttttaaatccaacctgcacagccaccgctttgagacagataagccacaatacttggaacacctgtaatttccgagttacataaaacaggtacgatcatgtaacgtaattcacatacgagccaccacatacgacccgccaccccattcaacaatctagtttttaaatacatttatcttaaccataacgccattaaattaattaaactaaattcaactatctttctggatacctgttaattttatgcccggttcttccacacccactataccttgctgcagcccgtggacgtggttctaaccctaattaagggcttccgcgcggggggtatagaggtgcttctgatgcttctactaccttagtaatcaattaagaagcttcttgaactgagaggccttcttcagcgggtatctgccttctagatcaggtctatttttacttcttcttctcattttcatcctataagttgtactgtagtaggttttgcggaggatagagcaggtatttgtagaggtagaaggtataggacgaagaacattcgatatagacggtttttcttgtaatgacttttggctatcttaaggagggttgtagactaagctgtagcagcggtacgttatacggtttgacatgccccaggacggaggaggtagcgctttaccaaaaataaaaaacttgatgaaagctccgatcagaagtactactaagagctggccgaggagaagcccttgtgtaaaggacaagctaagagggtgttagcaagatcacatagtccactccacagacagagggcgtacgaggattgaggcgcgagtggcgcgggctcatctgcattatagttagcataccagttcgagcccttggagatagcatcactcactattttggagcgccattgtcagcggctgtcgacaatccttgttcacagtaccatctccaagtggagaagatgttccaactttcggatctctagggctagcttggccgaacggcatatctcttatcgctgatatgccactcttgaccgcctgcctctgaaactttaaggaagtgcccttatctatttcgggactagcgtcgcttgcatctataaaatatgatgaatgcctgccactcgtttcgttttagctcacctcttgccgatttttgatctcagagttaaattgagcccctggattgcccagccctggaggctcaagggttagttaactagttactgatgtgcgctgggatgacgtaatcttacgagttaagctgcggttggggtccccaaggtacggtacatactgaagatgggccccctgaggggcaccgacagccctgcctgcgaaacaggtgtgagagcagagtcgtcactgggagtagtagggtgctagagaggagaacaccatggggtgactactgagaagagaggtggaaaggtgtctgcgttgctatctagtcagttaggcctcgggagtgcttttatgtcacatagccgcttagtcatcctgctctggaaactcccactgcaatacgtacatatatgtacatgtatagcaaccctccaccaatcttcttctttcccttccctctccaaagcactatcatcatcattcactttccttaatcctcgccctgtcgagatcttcattgacataatgcgcaacacctggccgtcccctatggtccgcaaattcattcgcgccaacgcctcggcagacccgccaaggccgtcgttgttgccctcatctgacaagtctgccgagaattcctggcctcaagaccctatccgagacgaatattgtttcttctacgggacattaatggacccaaatatattatccaaagtcttaggatcgtcaaaaccaccacctatgatgcgccctgctaggattattggttacgaaatcaaactttggggcacataccctgctctcctcgatgataaaccacttcatccagtcgatggaatagtgtgtggcctcttatcgccgacgcaacttgatcgacttgccgcctacgaaacggataaatatcatcttcaagcttgcttgattaacgttctgaataatgacggtagcaccgagaaaaccattgagggagtttctttcatgtggaatggtcgagaggatgagcttcgggagggtacttttgatctaaagcaatgggggaaggacagacagctacgtgaattggactaagaactacagaaatgtccaggttggttattcgatgctttaactacgtaagtactaggcttacttacacaagtaggatgtttacttaagaattgggaatttgctttaagacgttttgcttcagaaaatgttgctttgagacctggtgctaagctacatactacgtagtttctttataacaatattctttcggtcaccttcactctctttcaccttaagcatcttttgctctgacactgtcaattctcgcataggtcttggctcaatagctcctgatttcctatggaacagtgaatctaagattccacagttgacaccagatagttcaaagctggttaaaaacttctttaacccttggacatctcgagaaaaacgtgggaacgtggtgtctgacgctgaaattttgaacgaatggataaaggatgccacaaactctacccatggtaaacaggatttctcgtcgttcgaagctagtgcttgacgaaactcaattgtagtttttcctccgtaatacagattggtcaggttccaagcgaagtatcttctgccgccgtcgttcaaaagatctgcaatttcgacatgatttgtgcatcgctcgattagagccaagcaacgacggaaggtttttcctttcaggcgagaattgtcgcagtagttactcgctgcgtaacgattgtagcgtcggtggtctgggacaatggaaaggatggctggttcgaagtagaaaatatgacgggaactggatttcagggttctgagactccatggattcccctgaggtggagaaatgtggacgtgaacagcacatgttgggttcgtagagatcttgcacactaaattgagagctctaaacatgtgtcgcagctgatctctccaggggctttgcgcttggtaaaaaaggattggagtaacaagttccgctggctctgatctgtgttagtgttttgaaagtatgcatgggaattaagacctacattgctcagaattgccgattattgtcacatcatcagtcaaagaccactcagtggagtcttctagcccatcatataagccgtcaatgtcgttgtggattcgaggatgcggtttccttgcggcatggaaatgttgaacgagatagtcggcaaatgactccaggtctgtgaattcagacttcgctttggtacgatgttggagaagtagctcgagttcaattccgatccgcatcccagcctccatgtttggcgtggaaggtgtgagggtaggctttgattcgtgtctgctgtttgtagatagataaaaactccagtgacagatgagtgactttggtgatgcatgtggctcaaaggaagagtgaaagcagaaggaatagggagatatagggcagagtagagccagcattcgtgcaccttcctgatttatcacactcaacagacagcccgctctaccttcctgccaaacatgtgcatgaaaagcctcaagtgcctaatgatctttttatagctttggtacattcttatagcccaggtccagccaaccttgaatcgtccgactcaattcatcgatttcggcttcggtcacggtagtacatccttttggtcttgggtattcttttatctttctctcggatggaatctttatctgtatgagtgctaaaatcatagctgctctcttatagatgtttgtaacccttctctttggcaatcttatcttgttaagtaaagaagttttttctacctatagctaaatagattctaacagaaatccgtctgtattgatgtgtatggtacaactggacgatgttgagaactctaacgccgaaacgtcaaaagaaaggacggaaatcccgtcctccatcaaccccaacaaacaaatccacaacccgattgtaccgcagtcggtccccacattacagcgagcttcaccacccgaggcaagtcgctacgtttgaataatagtatcattgtcgctaattagactagggccaagcgaattatactctatcggggcttataagtgacgactcggtcgcaataatgcgacaagcattatcaccagacccggttgtatttaacgacagccaccaagcatgggcaaatagtgagggaacgacccttctagaaacactcaagactctgtcacaggcagtcaaagatctccagaaaagggccgatacccaggggcaggatatccaagacacaaataagagccttaaggacacacaaaaacaacccgaggatacacaaaagaccctcgaagaggcacaaaataccctcgagaatacacaaatagacctcgaagaggcacaaaaaggcctcatcaaatatgagcggacgtttgacgcacatacaattgagtacaattgaggtgcaatcaacaaaaaggacggtcagtgcttaaaggtttttaattgctgggcgctagcatgcacagaatagatggctgatgaatgatccacctatcacgtgatttgatctgatcttttcatgcctttattttcaggccgtcaagatgagcatgtctgtgcgctgactgagcaaacccgagcactcactgagcactcgctgagcgtaccctgagcactcactgagcaatatttgggaagtactaaacaattttttttacattactaagcataccctaagtgctcacagtgatcacctgtactgtgaaatactcagtgagcaggaacctgagcgcccttataaaagcggcggcaccccgatcgggaaattcgcgaccgtggcctaaaatccggtacatacaggtaaatatggcggagtacggggttttcccgatggggtgccgctgctttattagggtcctcaggtccaattcaccgattattaccggtacaccgcacaacggaggcaaacgaaagatatagaaatcatgtatctttgtaaatttgcatggctaatacatataagatataaccataacatattttctcaactttcgaaccatggagtaataatacgtacagtataagtctaggttgaattaacactaggattaatcatggctgcacgattcagctaccaagataggaaataatgatgctcaaaatgcctcacaaatcaataagcccagaaacttgttatctacgagtttgtcaaaaccattcaattagggttgagatattccgccacgatttcaatggtgggccggaatcgtaatcccgataaacgtccatggaggccttcgagagtcaataatatacgagacgtgctcagttttactctggcgaccaaaaagcggcaaggacagccctaaaggagaagggacagccatctatacctgtatggatgtaagattaccggaatataccacctgggatgtattttatcttctatcccaacctgaactgggctgaacctgacgcttagcgtggagaaggggatttttaccctctccacttctccagggcttctagcctttccctgagcgcttgagcatctttttgctttaagcttcgatttattttctagctttcacatgataatttcttgaatctcttattcacatccttgtggggtctgacatcgaaatctatcggatacttttctgtcagttcgactttcatgtcagtccccattgcacgaacttcactcgatacaatgcctcgatatacacagtaaacagcattattcggacgtaccattgacgccggctcataatttatgggaaagaaccaaactctcggcgcgcgcgcctgtgtgaatatgtcagagacctcctccacatcccaaggcgaatcaagcaccctccaaggatcagccgcccagccgttaaatagatcctgcgagtcttgccggagtctcaaggtccgctgcctccccagcccaaccacgtctaaccaatgccagcgatgcgccaagggcaagcgatcctgcgtcttcgtggcgccgcagagacggcggccccggaagcggacggattcgcgcgttgcacagctcgagaaggagatgcggatgatgcgttcgctgttgaaaaatcgcatccccgaggaagaggaaccggattccagtgacgacagcgacggggacgatgttcaggatgaatcggccgatacggacgctaagagcactctcgcattgcgggacaattcgactcactcgtccgaggatgtccgttatatggattgttcccctgaattgctaaataccccgcactccggcgtgcatggtagtggcggcttttcagcgcccccgattttcacggatatgccggctcgccatgaatcgctgcaggagaggcttcctccggcggacgacgtgatcgatcggggaattctctccctcgaagatgcggagcaattggtggcgtatttcattcacgaacttgcatttttctttccattggtcgtcttgccttcgaacaccacggcagctcaactgcgacaaacaaagccagtcctctttctctccgtgattgctgcgacatccatatccgtcgacgcaggattggcaaccgtgttgaaccgtgagatggttcgcctctattctgagaggttcttcatcgagggcgaaaaatcacttgagctagtgcaagcgctgctgctgatgatcatacattatttcccgcccgcctcgcctttgaagctgcagatttatcagtacacgcacatcgcctcgacgatggcgttagaaattgggttagctaataaacgtcgtgtctcgaaaaagtccgatcgcaaaagcagcaagcatgacgagctgctagctgagcaggcgaggacagttctcggctgctaccatctcggttcaagcgttgcgatgaaaacccgtcgcccaaatatgctccagttcaacgactggatgacagagtctctcaaacacctagaaaactcgccgcatcgaacagatcaacatgtagcgacatggttcgagctccaacgaataaccgacgaagcaatgtcctcattcggtctagacgacaccagtaccacatcacccttaaccgagtcgcgggtccaagccgtgctacgctggttcgacaagcggctcgagacgtggaagaagaacattccaccagatatgctgaccggtaagaaaccccagtcctctcgctgtgtcatgatgcatccaaaatcaatgctaacgaatcccatcaaaccagtccccatgatcctcgaataccgctacacagcactagcaatgtacgaactgggcgtaggagaaggctaccgcgacccagacgccataaagcgacgatatttcacgctgccgaccctcgatggagagaacaacagtggcagcgaagcaccggacgccccactcagcgcaatccgcatcgacatcaaggtgaaatggatgaacgccgcacatgagttgctggacgccgtgctggtttgcagcacggacactttgcgtaaactcccgaatctcacatacactcggttcgcgatggccgtgacatccctgctgaaaatacacttctccgtgcgaaccggtgctctcggggaagtcgtcacggcacaggccgtgaatgtggctttctatctcgatgccttagccagaaagctaagcgaggccagtgccgggggcaaataccttatccccagtcggtggtatcatgtcgtgggtgttaagggccaggattggtatgaccggctggagaggcgccaaaatggagggatagtagctggttctcaagtcgtatcggaaagcccgccgatcggcaccacaaaatcgatcccagcatcacaccctacccaaaaccaaaaccaagtgcaagtgcaagacacacatatggatcaggtcccagcaacgatggactccttccccggcgtccccatgcccccaatgccgccggcgatagacggatacgtagcgatgggcggtgcgggcatgtgggccatggacggcgggaataacccgaatttctacgccatgagcgcggcgggctatcagccctcggtgacgcatgcgcaggcgatgttgccacctcagtttgcctacgagccgcagaggatgccggttagtgctgctgggcagcatatggctagggcgggcatggagttggatgggtggcttcctgatgggagtatctttgggatgcagcctttgcctgaattttgagatggagataagagcctgggattaataaatcccggggtggatgcacatgaaagtgagtctacaacatatataatgtcatatatcataggtatgaactgtatatacatatcagcttgttaatattttaaccccgatatcccgtagtcatatcagcaagggtaaagggttatgttatacttaccagcacattgagaacatcatccaagagattcccaaaaagctagagcctagctcccaataactcaaccctggtagatgggagtatcacttcaaaggcagacatacccatcaccacacacagtcaagtcaccaagacgagaagaaaagaaaaagaaaaagagaagaaaccatcaaagagcgagtaccccaacggacattaatcgcatttaaagcgaaacaaataatacattcgcaaagtgctgtcggaggctcgggaggatcggaacttccgtggaaccgtcggggttcattgacgtgttggatatgggtctgatgtgggtttattcggggtcttggctgttcctttctgcactacggggtatgttgtatgtccctatgttgcattggtagtttttgatagcattggcctgtgtcttgtactccttgtatccgaccttccagataggtcttggattaatttgtgaatgtatcgttgttattgtatttcgatgtgactatttgaaggattttaacttcgttactcgaaattgagttgtataacacattcgtggatcgggatctatggaggatccgattccatggataatcagacagtaaccacatgcaaaaatgcacaggcagatcagtaatcatagtttatgtaaataatctcaatcaaaacaggttcgtgaattcattgcgtagatagaacatggatatcaaagccaaccgaaacaaagaccaactacctgatatattcaactcctggcctggcagtacagaataaaagaaaagcgtaaaagtaaagcaacagaatcatagaattgaaaacgcttccaacgcatccataaacccagcaatagccccaatccccaccaatccccttgtagcatttcgagtcaacgccttctttcgatccttggcatcttcacgcggggatcggcgtgggtgcgtcgacggggacctttgatctgagcgagtcggcgaggatcggaagctagactcgggggacgaggaggaaagcgggtatgtggatggatggtggcggggttggagtttgttgttgttgggaatattgttgtatgcctggtttcgagtcttgggggcctcgaagtagacttggcttggcgatgtgcctctgggagaggggttggaattgggaatgctgatggctgggtttgattggttcacgtttgttgggatggatcgggggattgcagcgtagtcttggttttggtagtatttgtatggctgctgggggggacccggctgtgtgtgtgaaggtaatggtggaggtcggggtagagcatggttcgggggtgggaaactgccgcttgggtatgcggggggtctactgtcgggattgttatgactcggatatctggatgagacgctgttggaatggaaacggcggccttgcatagggttggtgctgtgtgagggtcgaagagtgtcgggtctctgctcggcttcgtcacttgagtcgatgagtctcgagtcgctgcgggggctggatcgacgcttgagatattcgtccggctctggttcgctttccacttgagcttggtagctggagtactttcggcgtagctctgctgcatgatgtcgggcctcttgtgaatgggggtctctccagtccactgttgctccttcgaggtagtaacctcggatgctgtgattatcaaagtccggctcttcggtatcatcttcttcggcatccgaagagacgtagactcgaggttgaactcggttgttggatgtattaaagcccttggcggcatggtgtagttttgaagggtcaatcgaaggcacccagagtaaaagcagccggttcaacgtgctctcagatagtcgcaccatatctttcggggatatttccatatcactcagttccacgtcactattccccaaagcgatgatgggcagtcttgttggatccgagtgtctggttgcggcagcaaatggcttcgatgtcgatgtcgtattggacgagtaattgaaactgatcctctggtttgtcgggttcttggcagcatctaaagtctcctgttccacgagatcccacaagcgatcaaggcgtttgacagaccaatatcggacgatgatcatgttctgagattcagctttctcctgagcaatggcatcgttggtagtggctgtaaaggaatcagtagcaattccgtcgtcaatactggatttcaaaacgtccccaagctctagagtctgtagcatcacaatcagactgagcttgagagtttccaactgggctagcaaataggtgacatgctgtttccggaaacaccatttgagtctatcctgcagtgggattctcataagatcattgtctctatcggttgccttcagtttgtccagcatgtgttcgatttcgatgaatatcatctggccttgtccggagatctcccatgccttctctgtcgcctcgggagaccgttccgtatcagtgccctcaatgatctgcccgacatttttgagcaccagagcgaaaagcgagattcccttggcgatactatgaatctccagtctagactgagcgagttgacaagcggcagcattgaggagcagtgagaggcgaaaacccgcaccggcaaccttgataatggaagcctgtgagcctttagagagaaggaactcattagtagaatttctcaactttcaaagggaaagacatacctggtgccatgataaagcagtgtttcagatcatatcaaagacaaagtggacttcctccaactatcataacctccaagctgttccccgccaagaactagagccgcaactgcatatcaagtgactcacgtctgacatatcaatttggaaccccggagggttctctgtctgtacgcccgcgattagtggcgtcatggtctatgatttctcgccttctcgttggtttacgaggaccggcggagttgatcttcaacccgaaatgatctagcgcatgcttttcattgttacatgaagtcccgggcaaaagtaaccggcactgcctcaaacctcgattgccttggatttgtttatcaagactgttttgcccgtatcaaaagggcagattatgccccggggatttcagatgcccctacccttgctctttacccggggtttttcccagggcgaagcatggtggcaatgacctcgtattacgagaagtgggaatcttgaatgaatggtaagctgattactccgtgaagaatttcgttatctccgagttaagggatctctcttgccttgtataacaaaatataataaaacagctacaaacacagccctggggtatatatatgtgtggagaagacatgcagctattccgaggtggatctactaacattgacctattaatgtgaaacgctcctatagaatgaagaatactccatagagaaacatcaatattcaaaacaatcaaacaagaatgtatgtttttcgaagatctactgttttcattcagacttgtttatttagcatcggacccgatgggcgcatttccgctttcggtccctccacagttccttttgcgatttgcctaatctctccccagacatccaaacctccaactctctactataactctttaagctctttaattacagacttgattcaatcctttgttgtggctgctctctgctagctaattgatctctccgccgcattctccgcccctcctttttccgccgcgtggcacaccgtcatctgcggagactattgcccaagcctgtccgatgacaatctagtggcccaccatcggacgtgggaaactcgtgataaaacaaatacgcccaaataagagccccaaagctcaacgcaacaatcgtgaggccggatgggtgagctcccgaaggtatcgcgaaggaacgagggacaactgggatccgatacaccaccttaaggcccccaagagcctccagtccatgaaaccatgaccgcagcctcgggtgtcactgtagacacctccgattatcctatattatccccgccgaacgccctccattcgtcccagcacgagccccaatcgacaaagggcggttcccccacaaatcagaatggaaaagagacagagcgctcagcgccacaaccagtagcacccaaacccgctgcaggatctgttaaacaagatcctattgcatcagatgaagtagatgattttggccttcccatccgagcacgccggcacaaccccgcacccagcgaaggagagaatgccagccaaaatatccagaatgtacctgtgagctcgacgggctacagtgacgctgtggaaaagggaaaggagccagagttatcacagggcaagctagccaattcgaataatacagaagagcgaggccagggcgcagaccataacacttcttctacactcccctcgtattcatcggcctctacagctcttgctcagcctcggacctcagcttcgaaacaaaggtcaccccaggtgtcggaatggtcgcaccagcgcctcgcccaacctgatgcacattaccccgagagcgaggagtcagagccagagcccgatgagtggaaagcgatgcctgcgcttggagagttcgactattatgacgactatgggagactcattgctcgtggcgccaaagaagaatccgacgaggctgtataccaaggattgggaggagcagggaggggctatactcgggtgcagctcgacgatgatgcccaatctgctacaagtctagatgatgatacaagctacctctttcgagaggcaggcggcaactctgctggtctagttggcgaggaactgcgagataccatcagccagctccaggccaccaaagaccttctcaacgagactcaaaagatcgcgtatgtgggcgttgtcaggttgacaatccattatatgaatcatgatctggcgtcaattgccacaaccaaatctacgcgcagaaccatgcagaaagcctcggatgccatgcgaaaatggggccaggcgatcatggggcgagtctatgctcatatggatatcaattccgctgagcagattatgattgagcagctcgcggagcatggggtggaaccagaagatctggtgcgaccactcatgcagaatgcgcgggtcaagaatcctatggcagagagtgagccgaaaacctctacatccagtcgaaaattcgattctccatctaggctctccgcagagacggactcatctgaactagatccacctccgccatacgaggtccacgagactgaggagctccctgaggtcaagacgccttctgagatgccaacctctgaacgcatagatatcgatctccgctggactgtcctctgcgacctgttccttgtgctcatcgcaaattcagcatacgacgctcggtcgcgcactcttttggaaagggtcggcgcagctttgagtgtaacatggctacagatctcacggttcgaaaagcgagtcacagactcccttgaaatgcaagaacaggaagagaaagagaattgggatgagtcagatcacatggaaaagcgtcgcaagatggccttgaagcggaaatatatgattatgggtttagcaacggtcggcggcggactcgtcatcggcctttccgctgggttgttggcacccgttatcggagctggtcttgctgctgggtttactacagtgggtatcactggaactagtgcattcctgggaggagcaggcggtacagctttgatcgcttctggtgctactataggtggaagcaccattggaatgagagcttcgcaacgacgtatgggtgcagttcaaacgttcgaatatcgacctcttcataataacaagaaggtcaacctgattgtgacggtctctggctggatgactggcaaggtcgacgatgttcgtctacctttcagtactgtcgatccgattatgggcgatatctattctgttctatgggagcctgagatgcttcgaagcatgggtgacactatcaatattctggcaacagaggtaagcttctagagatgtgcgctaattgttaatagactaaccaattccctaggcattaacacaaggtctgcaacaagtactaggcagcactgtcctgatggcgctgatggcatccttgcaactaccacttgtcctcactaaactcgcatacttgattgacaatccctggatcgtttcgttggcacgcgccaattcagccggcctcgttatggcggattccttgcgagagcggaatcttggcaaccggcctatcacattgcttggtttctcccttggtgcgcgtgtgatcttctcttgtttgaaagagctggccgaaaagggtgcccacggtctaattcagaatgtatacctatttggctcgcccgttgtggcgaacaaggacgaatacctcaaggctcggagtgtggtatctggccgatttgtgaacggctatgccacgaatgattggatcctgggctaccttttccgggcaacaagtggtggcatcatgaaagttgccggcctcgcagctgtcgaaggtataccgggcattgagaactttgatatcacctcacttgtgaatggccacatggattaccgtacggccatgcctcggattctgagggaagttggttgggaggttcttgaggatgagtttgcagaaatcgaggatccagacccagataaccacgccgaacgacagcgcgaattgattcgcgagattgatgaagctcgccgagaagcagaggcgaagccagagaagaagcgcttcggcctgttcaagcgaggcaagatggccgaaaagaagaaatgggaaacgtatgatgtcgacaaaaataccgctcctcgcgagtcaagcgatcccgaaagtagccccggcactgtcctcttcgatattgaggccattcgagccgagttgctctccgaggcgatcgaagtcaaagaattagagtcgactatgcctctgatgaagctagacctgaacgctccgtcaaaaccgtcacccgcgcagccctcttcccctatcgacaggaggcccaagacacccgaactcccagctgttactcgcacttcttcactacccccgcaagcctcggggcagtattctccttacgggcccaatgaattctctcccgcgccgatgcacgaagatatggaaatgaccttcgacacatccttctatgaatccccacgatttagaaacgacgaccttcactctcgtccggagttgagaactgcctctacaatgccgacggttggagccagtgccatcggagctatggccatggagcccaatgcctgggcggaccatgatcagggacatcgggatggcgagatctcaatgacgttcgaatagtgtcggctctgggatccttctcatcttgctttccctttctctctttatacttttctttcccggtcttaagcagtagaaacaggtcaaaggtctagatattttgtatctggtctaattactgacccttgactgtggcttgcgagttccattcgtccccatacccgaagtctgtgatacaattccatctcaaacctttcacaaccgtacgggcttcgttacattgcgctagcatgtcctcgcctggcgaagaatccgatttcaatgttttctcctgcacccctcatgttcgcaagaacacactggcatgctcttgaagacggtagtcgggaactctgttctggtcatttccgtttcgacaaagaggatcaagatgctttccatctatattatgcatgtcatctgagagtaattgtgtaaccattctgtatataactgaattagtaactgtctcacgtggaattcgagtctcgcgtttcccctcatatggcgctgagtacggcgggcgataacggcatattggacaactatgcagcggacatttgattggctcggaatattgactacttcaccgcctttctcaccgccgctctcttgatgtgccgttcgatttctggggcttttttacaacataggccagaagtcctttgagggtctctttcttatgagtttttctttccttcttgatgttaactacgggtagctggaagaatgattatcagaagctctctacggtcaatagtgaattatcacagactttgggactaagacggaacggataacggtgacaattatacatacctttcaatatataacatgcaattagggaatgtttggagtattacggagtacaataaatagacctaactagtgaactacttcatattctataaatgttgttacacgcaatggttttctgccagataaaaccccgacctacgcgatgattcaaccaatcaaatccccgttgtccgatacgccgctatcgcccaccgtggccaggtgtccgcattgtctcagtttctcgaaaccgagcgttctttgtttcgaaggcccaaaaagaaatccaacaccgaatcaacactgtacctcgaacttaaccgcagacatctttgcgaagagacttgaaatcacgcaacaacgcgccctgttccaagcccgaattccctcccccggcctgcgcaacgcgcttcacatgaacccggactagttctctttgactccaagctttcagacccccgattgatgccgacaattggcgattgaaatcttccgccaccctctatcatggccgcttgggccaaacctgattccagccatgcgtccaatcgtatgacgagggacaatcctccgcgcgagcatcttttgtctactttcaataaacccaagtctgaagacgcgattctcgacgtcgcgacaatcaatggggaggctgttcaacctgtcgagacaaagccggagattaatacagacgcggagcctttaagctccgacgaagaggacgtcggagacctcattgctggacctagcattgagaaaaagccagaggatgatacagataccgaacctctaagctccccacctcttagctccccacctctcagctctggtgaggaggaagaagcggaagacccggaagcgaacgctgctcaaccaagcatcgagaagaagttggatatcgacaccgatgccgatcctctaagctccgatgaagagcaagctagcgacagcgatgcttccccacctcgcaaagaggtaaactatacgactgcgactttggaaaagaagcttgcggaaggaaacaatagggcatacaatagcccacaaactcgcaatggatactctcgcaaaagcaattatgcgcgaaccctcagtgctatgacgggctccgatgacgaggatgatatatttttgttctcctcgcagagccacaagcggcaaagggcaacaaaatatgcctccaagccctcgacctatttcaacaggccatctttcccctcacggtccaccgagaaagaaatgacctcctcgccagtcgaagaatccccaaaagaacccgaggtgacctttataatgccaaaggacatcgaaaattcgagtttccgagaacctcgtggcgggaaagactcaaactctatatcgcacccatacacgaaggaagaatgcgaagcaatgttgcttgacgatgattcacctctctcatccccatcttcttccactttcgagcaaatgtcgcaggtcgatgaagtggcagcgaaagaagacccccaaccgacatcaccccgtctagccctgtgtccaatgtgccataaggaagtagactgggccgagctagaactgttcaaatcacagccaaagcaacgtattcgcgagcaaatgatgttctgtgaatcacacaagcttcgcagtgcgatggacttgtggcgtgagcgagggtaccctaacattgactgggatgggtttgaagagcgcgttcagggctatttccccgagctcgaaaaactacttgtccctggtgctttctcttactaccgaaatattcttggtagctctttcgcaccagggaaagcgagaaactcccgtgtgagagtgagcgataacgagagactcgagacgatgacctgcggttattatggtagtatgggtgcaaccaaaatgtatgtggtatataagcccctgcttaatcggactacgttaacatttatgtctagactagaaacaatcatccgtcgtttttctgtggttatacgtcgcttagcgacaacagatgatcttatcaagacagccggcgtggctggctacacacagtctgttcttgtgcctgagttggctgtgctaatggtcaaggatgacatgaaggtcaacgacgaagatgcccgtcggattctgagggagagtatggacattggcgacagagttaatccagacttcaatgttgtccccataccgaaagatgccgaatgattgtgggtttacttgacttcattatataccacgggttttatactgtttcatctgatttctggctgtggcttgtgatttatctctgttcgcccccattccaagggccatgcattttttttcattttgagcgattgtatataggtagccattatgataccactcatgttttgtcttccatctactggaacaccaatcgtatcaatcctcaataaagtccaattcgcgcataactagttagttagtcgttattacttagtaagaaaagagcaactcttaactagctaactatagatcgaagataaacattgtcccaaagaggcaagttgatggcgggctgatccgtgaggggtagctttgtcagccgataaggtgattgctcggttgatgacacaatgcggagaagctttccacctgggcaagattgcattctcactcttctatccttcatacaagatgagggaaaaagacatgccttattcggagaccacacctctgctggaggtcaatgtcgctcctccgcggcatagatatccccacaatgctgttcgtcaagcgtgtactatctctcttgcagccctactttctgtggcgactcttctgttcctaattcctactgccattctgcctcgagagcacggctccatctggtcctatctccctggtgctcatccaattccacatgaagcgtggccagagagcttcggtctgccttacgaccagctccagcagatcctcctcaatgtgccttccgcagataaggcccgagagtggagccaatactataccgcggggccgcacttggcagggaagaatctgtctcaggcgctctggactttggaaaaatggaaggaatttggggtggaggataccgagctcgtggcgtatgacatttacatcaactatccggtcgatcatcgcctggccctcttgaagaaatccggtgacaagaccgaagtgaccttcgaagcaacattggaggaggatgtcctcgaagaggatcctacttccggcctgccagaccgtgtcccagtgttccatggctattctgctaccggcaatgtgaccgcacagtatgtgtacgtcaactttggcacgtacagggattttgaggacctcgtcaatgcaaacgtcaccttggagggtaagattgccatcgctaaatacggtatgatattccgtggtttgaaggtaaagcgtgcacaagagcttggaatggtcggcgtagtcatctacagtgatccgcaggaagacggtgaaattaccgaggaaaacggctatgaagcctatcctaatggaccggcacggaatcccagtgctatccagagaggtagcactcaattcctcagtaaggattcttttccaaggtgctgatattgcaaagctaacttgaacaaggtatccttcccggtgaccccacaaccccgggatacgcatctaagcctggatgcgaacgacaagatccccacaactcaatcccttcaatcccatctcttcccatctcgtacaaggaaattttgccattcttgaaggcgctcaacggtcacggccccaaagcgtcggacttcaacgagttttggcagggaggcggcctcggctacaagggcgtagagtacaacatcgggccatctcccgaggatgtgctgattaacctcgacaacctccaggagtatgtgacaaccccgctgtggaatgttatcggtaccatcaagggccacatccccgatgaggttgttatcctcggtaatcaccgtgacgcgtggattgctggtggcgcaggagatcctaacagtggatccgccgcgttgaacgaagtcgttcgcagcttcggcgaggctctcaaggcaggatggaagccactgcgcactattgtctttgccagctgggacggcgaagagtatggccttctcggctcgaccgagtgggtggaagaatacctcccatggctctccgaggctaatatcgcatacctgaatgtcgatgtggctgctgcgggcactaatttcgaacctcgtgccagtcccttgctaaacaaggtcatcaacgacgtcaccgctctggtgcagtcacccaaccagaccgtgcggggccagactgtccgcgatgtctggaatggcaagatctcgacgatgggcagcggcagtgacttcactgccttccaagatttcgccggcatcgccagtctcgactttggctttggtcgtggtaaaaatgacccggtctaccactaccactcaaactacgacagcttcgcatggatggagaagtacggagacaaggacttcctctaccaccaagcttgcacaaaactctgggctctggcagcggcacaattggtggagtctccccttcttgcgctcaacgccaccgactattctcttggccttggatcttacctggaccacatcaaacctgcggcggacaatctcccggagaacactcaattcgaattcgcacctctagatagggcgattcttgagttccaggaatctgcaaaggctttcgatgcctttgctaccgacctgaagtcccagcttggtgataacgtgccttggtaccactggtggaagaaggtgagactgtggttccagattcgcgctaccaacgcgaagtacaagggcattgaacgggctttcttatatcagcctggtctagatggccgtgaatggttcaagcacgtcgtctttgcccctggaatttggactggttattcgggagccacctaccctggacttgtagagagtctcgaagctggagacgtggagaacgccgaggtatgtgtttatttgcgaccctttctgccttgggtacaattactaactgatgggtttttagaaatggagctccatcatccaggatcgaattggtgctgcgacccagttgttgctgtaaatgggtaagcagacttcttacctcggtatgatagagagttggatatacagcaccgctggccttgaggatgcacagatatatcaatataaacaagtctcccgaggaatcggggtcatgtaaacagttccgaacacataattatatagttcccagcattaaattatgcgtgcacatttaccccggacttcgtcatctgactaatcaattgcatgaccgagcttcgtctgcgttacttacatctctcctgatctcaccctctctcttttgacctacaatccttttaacaagcagaaaagaagagacaacctgccttaaaatctacaagatggtatgtccttagatatacttataccacacctccaatccatcctagtccgaccctccaaggccgaatccgaaccatcagcaccatgccaccacccatctcgtacatctttcctaaataacccaaaactaacaaacccaggcatcaccaacaagctccgccctagcgctctccctcctaaccagcgttggcgggataatcggctacacacggactggatccatcccctcaatcgccgccggtgtatccgtcggcctcgtctacctcttcgcattcctgcgtctgcgcgccggccaaacctacggcgaggaacttgggctcctggcctcggcagtgctaggcggaagctcgatcccgcgtgtgatcaagacgggtggaaagcctgttccgctcgttttgtcggtgctggctacttatgggctttttgtttttggggttgcgtttagggagaagagggcgtaggaattggaattgaaatggaaatggaatttaaaatgttaaacacagataatggagttgaatcattgtttgttccttagttatatccgtacgtcatgtcagtctttatcagctatttgcgtattggctttggttggatgctgtacgaatcgatgctactttacggagacaaggtacatcataatcgaacatgcattggtagataatgagaagcctaccggagaaacgctaaaactcacagcagccgtagatggcatcatttttgccatctcggcattcacatcaaacaaactcctccaggccagggttaaacctccagtggggggccaggagggaggatcaaagggcaggcacgtactgtacgtaggccgaacgagcggctcaagggaaccgctcagttctttcttttttttgttttcaactttttttgagttttcctttttcatctcgcagcatcgtactcaaacattaacgacgtttcctgggtttgtcgggagagagatggtgggacgggggaggactcgccaaactagggtttggaatcagggccactgatgaaaccaaagatccagccaggagaatactcatatgtaactagaagttttggtgtgtcgacttagctgggttccgtaagtccaccacttgcaaacgcagcaggaaaaaaaaaaacaaagcaggacttaatgggccgggtcgatcaccgtgtcggagtcttgaatggcgcccacgattgcgttgccggggatctcgccgaggacggtctgcgtgcttttgtctgggacgtatgcatatcgaggtagctgcgccttcttttcctcgggactaagcgtatcatcattgtaaatcattcggatcgcaggcttggccttttccttcttgggcttgctgctaccctctgtcttcgaggcggcatcatttgctgcacctgaaatctgattgtcaacagggaaggcgttctcggttggtcgggcgctggatccattagagtaaccagaaggtgcgggggtgggggggacgtgtcccatgtgcatctgttgcatttcgtgcgcgttgactgaaggcacagcaaaagcaggacgctgaggaaggctcgatgcggccggcaggcccatgaatctgttatcggatggtggaggctgttgctggtggtaagggggagccccataggagactggtggctgtgcaggaagtccgacgggaaatggcgaggggtatccggagggggtgtagggcgaggcaccggggatctggtgtccaccaactggggaatagcttgaatagacaggactgccagtctgcgagaaatgaggtgtcatggcggtgggaggaccaccataaggctgagggtaggagtattgcggagtggctgcgatctgaggcgatggtgcctagtaataattgttagctcccaatacacttcacgttgaacagaacagcagaatacgactcacgtatccactgggtgttggtgtagactgaacagcactagagggtgtcacatcaccactgctacctcccgcaagcgcctcagcacgcctagccttgtgttcagccagtcgcttcttgagctctgagacaggttcaagcttgggcctcttggccggttggccgccagaagaggcgccagtaggagggttgcctgtcgcatgctggcgatccagctcagcctgctgaaattgtgaagcgacacgctgctgatgggctttgaggacatccgcgggaataccctccatgccaaagatttcaatatcgacgcccatgcggttcggcagcgcattttggacctgagtcaattgctccttgtggacctggctcaagtgcacggatagacctagcgacacaagccatcagtatatgagatcactttatctgataaatgcaacttacctccggcagtgttcagtctgcgatggcagttgtcacacttgaaatgcttagctttctggtgagagatgagaatcttcaagtcatcgaagtcacgttcacagtagtagcaccatgggcgatcgagaagctcctcgagagagggaccgcgtctttttttgcccattgtggtgttgacgttaacagagacaagattgattcagatgatgttaacagagacaagggtgacttcaaaaaccgtaaaatatgtgtgcgattgcaaaggagggatgaggggaggtatgtgtcgcagatccggaagcttgccatgatggatgaggccctttatcacgtggctgcacgtgatcaagaagtatgaagttgtgagtgagaaaacttttgagcggtgaggacgagttgcagaagtttttgctctccgcctcttaaattcgagggaattttgagtcccgcgatctgctacaatagggttcctcgcgtttattcacttcctatcgctttgcaggtccggaagcttgccatggtgtatgatgctcgatgatgcccttcgtcacgtgcctagcacgtgatcgggaagtatgcagtttggagtagtatgaacgagttgcatgagtttttgctccccgtctcttatattaaggataattttgagtcgtacagtctgctacaatagggttcctcgtgtttcttcacatcctgtcacttcgtatatctggaaacttgccatgatagataacgtccgttgttacttggttagcacgagaccaggaagtatgaagtttggagtgagttgaaggagtttttgctttctacttctcacatttgggaaaatttctgagtcgcccagttttctatatcagtttctttgcgtttcttcactttctgctacatcgcagatccggaagcttgccatgcatgatgcatgtccttctcacgtggctaacacatgatcaggaagtatgaagtttgaagcagtgtaaaggagttgaaatggtttttttgcttctacctcttacaactgggaaacaattttaaatcactcggttttctataacaggtttccttatgtttattcactccctgttaattcaatgatggatgccgcccattatcacatgctgagcacgtgatcgggaagtatagaaaacatcggagtagtgtaaaggagttgaaggagttgaaggagttctctgcctcttatatttgagaaatttcaagttgcgcagtccgccacaactagtttcctcactctcatttagttcctgttcccctgggctactcttgcgaaatatattggagtatgtcagactgggatatggcaccttggtttttcttatggtctagcggtaaaatacgctgtatattatccaatagagtagaattcccattatactacttctgaataatgatactaaaactattatctgctacaatacagatttagcgtggtcagatgctgatttatataccgtttatccatcttgaacataatcccgaatctgatttccaagatacaatctaaatctttggaaactagtgtgtacaagttaagaattacagatggagaccgaaacttttatacaacatgagtttgaaccttagaatacatgtactggtgcccctggcacatactgccaggggcaccagtaccttcataatgtatcagatcatcccatccccagcccaccccccagggaggtccgaggccacaggaaatcaccccaccccggtttataccgcgggctcagcccagtcgcgaagagggccgtgcaccaagcagtgaatgtaaaccggggtaaagatgattccctgcgacccatcccaaaccctggggtggtccaagaagaaatgatcatttggtgttgaggcaatccccagtcctctctctctcactcgggaaaaaaagtgagatgaacatgaagtaagataagagctaaagtgagagagagaaaactgaggattgcctcgacaagagccggcctaccctcaatggcgtgggtcccgcgggttatgacccgggaggggacccatcccgtggtactggacgtacgggaatggggcgtactggggcggcataggttgccccagttgcgccattggcgcaacagacgcagcagcagcaaaagggttcactgggccggggccgtagtgaggcaccacccccataggagggagggtgggaggcatgggctgctgctgcgcctgtacgcttgccattgagggcaggccgatgggccccttgggggcgaggttgccagcaagtggtgccagcgaaggcgaccgcttgcggcggccggggccagtgggcttggggacctcgtcggcggcgccgtcgacggtccggtcctgctcgatctgggccttggatcgctttgggttgcgaatccgtccttcccggttgaaccggtcccaatgatcgagcatcgccttggtcctcttggggttcttcgaattggcgatcttctggcgcctggcctcctcgatcgcctcggcagagagagcctccttcttggccgatgtcgaggtggactcgacagggctcgcggcggccatcggttcgacggccgggaaggaggtctctgctggagggatcgatgaggaggccaggctgctagcgccacgtcgacccctgccccgagatgagatctgagttggggcaggggtgacttcgaaggtagcccgggaggaaccaaggcgaccaagcccacggccgcgtccgcggccacggccacggccagagctcttgcgagagtttgcgtcggagtgagttgcatcggtgacgacagttttgccgccgcggcctcgggcgcgccgctttgccgggtggttatcatcgtcggtttcatcaccacccgcactctcattctgagtctcttccgactcagtggttttggttggtacttcaacctcggcggccttgcgtttccgagtgactttcggcacaaggggctcacgccggggttcgtacatctgagcgtggtattcaagaccatgtttcttcatggtcgcccacccatcagggttgagatcaccattctccttgctcttcgcaatcatctttctggcttgtgcgggagttggaacaaagcctccctgcacaaacggatcctgctgtgtgcggatgggcacaagtggtgtgttgcccgggaagtagttgtgtttgtagccataaagcatggcctctttcttttcctcgaagtcaagcttgtcctcattgacgttagccagaggggctccacccttcttcttgtgaccctgcatttgatgtcgctttgtttggtatgagggttcatctcgcttgtgtcggtgtgccttgagataaaggttgtcaagggctagatattcatcttggagtgttttcaaggtgaatgcggcggtctgtgtgagtgcgtagagttcttcgggtgtgtggttttcgggattgcggagcatgctgacaagctcatctagttcctgagcctgtacttcgaggaactgacctttctcgaccttggacttcttgtatggaagcgggtgaggagctggttcaggagcgtcccgtttcctggtctttgaagggtcatggaaagcattgtcccaagtggattcacacttggcagcttcctggatgtagttgggggagaattcgtcggtatcgtgaactttccagaagcgctcaaggcgctttttcacatctggacgtcgccactgtgcctcgcggaggcgatactcctcaggatatccagtacgcggattggaaagccagtccaacagatcacgtttcgtttcggggatctgactggcattgacttggattgtagttggctggatgccattgttatcgtcagtggtcaattccactgcgatctcttctccttcttcatcctgagcctcgccatcttcgggcttggtggcttggaccatgggctcgtcatgttcaatggcgtcgtcatcttggagatcgccattctcgtcgtaagtgtcatcggcgccgtcttcggcaccatcatacccagaaaatctgatggttttcgggtgaacttcgttgacatgatccttcagaacatcttctttggagatgcctgcgtcatttgggagcatcaaaagcttcccacagtagtcacacttgagccgtcgaggcacgggctctggagactgagagatttgggtggatgtagattggggacgaaagggttcagaaaattgacgacgtagcggggagtcctggctgtcaccaacatccgatgaaggattgtccacatccaaatcggcccttgggatgggggccattttggaaataaacagtggaggaaaaaaagaacaagaggggtataagtgtttcaatatccaggagaagagaagaagaaaaaaaaaacacaggtctcaaatggagaatgaagaatgtcaagaaagaatctgtatagatagtcagcgtgggttcgcctgcggtgccaagacgccagtaaatcgtagcgcaattccgcggttccaaggccgaaggcacgaggcatggaccagcgcgaacacaagaattgcaaaacattgtaaacccagtgaacgcgacatgtaacatgagaaaaagcatgaaacatcagatacggtcgggccaaaatgcatggatcaagatctgaccgggaagtacactgggaaactgtgccatacaaaaaaaaagatggaaaagacgcgacacttaccataagatgtttagaatcgagttgaatccttgtgggcaggacacacgagtcacagcgaatgactgctggctgttagtgagttatgcaaagaaggatgcagggtggacatgaatggctgccagggatggtgtacttactatccgactgaagaaggctgggtagttgacagtccacttattgagacgacgcgaagtgggatgagagaatatggaggggggatgagatttaggagacaggtgaaatagatgatatgtcagagaaaagtacgttgcaaacttgtggtgtttggcgcgcagatcttgcgtcgctgggtagtatgaagaagaaaaaatgatcttcgtcgacgcgacactgcgcaaagaagaagacacgaaaacaaagacagcaaatgaagtgagagtacagaacagaatgagcacgggaaaggaaaataaatgggaaggtgaaatgggttacagatgatgaagttgagaagagattgaggttgagagagagatagttttgtagtttcataggcagtggaaaccccgtcctggcccgaccaatcagaggcgtcgtatctactagccacattgaacgacattgaggaaaggggggtttttgatttggattgatcactattgatcgcggatttgattgattctatgcattgtattgatcttcaatggcctattgtctttattcctgcattgttacctcttgttcctattttcgtttttttcaacagacgtcacatgatgcgtactttacggtcgaacaatagcaagctcctcgatagcatgtcgcctcaatagcctcaatagctagctattgaggtcaatagtgaaaaattagagtaatgcattttgggcgacctagtggtaccgagctctatgtgctgtcttccagccgctttctgtgacggtctcgtggactcctatatccataatccaagtcacgggcaagcgataggaagaccgaaggccgaagatttggatgttattagacaggtagccgagcacggtggatacatccgtgggggactgcccttgacctccggtgcatagtctccatgccttgtgtcacaaggaacggaaaagtgacgccccatcccagttgggatatagaaacaggaatacacattgtcaactcttcctttattatgtctaccttgagtgtcgagagcacatacgacaagttctgcatatatcccgacaactgtctcctatcctatccgtacatcaaatcacaagtagaggcagcagacatgccaaacccacaattataaccgttcagctttagcctcttctagttttaatatcaaatatgttgttataacgttcgagaagaacccttgtggcaaccgcctcgtcatcagcaagaatagccgctcatgtctccttcgcctatacgacatatttcaaccctccagggcttgtcggatagtaactcagcccggatttgttcacatccataatgattatctacatactaagttggttagttggatataataacttgtcgcattcgtcgttgccattctagtgtagaattttcccaatctgttagaatctttattttcaacgtcaaacttgatgataatctctattagacacagttttttttacctaaggacactgaagagagacgaatcaaaaaaaaaaaaaacgaaagtaataaacaaagatataagaaggagaaacgacctggtgccatttccctttccggactgaaactgccgccgctttttttcatggagtagatctacctaggccctggggccccggggcagatcctatcatcctacaattcatcctcggcgccacatcacaataatattggtagaatgcatcctaaaactatctcgccatcaaaccttactattgatatttgcccatttttgagtgagtacccgtgtggccagagaaaaaaaagaagctccctctgggacgaatcaaggacttcgtcattacgagtgatgtatactccgtactaaaggagctaattttgaatatctcgagactggcattttcagtcaatatagcacggtactggagctctcctgtcaaaaatgtaccctgccatatgtatgtcaatttctcatcggggatgtgcaagaactagattcgtttctaaaatgggtacataccgatctccaccactaaagcagcagccaaaaaactctgataggcaatataccacgagtgggtccccggggtcgccccaattttccctggaatgttccttagacccgtgaaatgccgaggtctccctagaatatttctagtacatactagccctctttaggcagatttacgaattgtatagaggtctttatcctatgggaacataaaatgatctaaagcagagaaaaacatgtcaatagggactagtttagcgcttttttgttgaagtataagacatagccaaggtaggatcccaaagcactacatagcaataagtagtaagctcaataagagtatagtagtattatcagcacataggtggtacaaagtgcctagaaacatacaacatactgcagggactgtacacattctatacaaagacctatagcagtgtcgcaccaaaacagtgtctatcctaaataaaagtccaatattggttcgacctgacactattcaatcaaaagcattccttaaaacattgattgttaaggtacgtcgatgactgcaaagcagtaactatcaacaccgtgctaattatccggagagagcattaatctctggcttcaaggccatctgtgattatactagtagtcgcttagtttatctattgggtaacctcgaagaaaagctctaacatagcccggtatacgcccttgagggctagttggatggtcttagagatttttgcggaattctctgatgttgaggcttctaaaacttcagcaaccgcagccaaggttaccagctacgaatcattcgacctcggctctcctgtctacttaatcttgctatgatttttggtcctatgggaagcatgcactcggaaaaaagggttgaatcctgcgtatatgacgattattcttctataacatttttcctgttgccatttggtaaaacataatatcaattcagtaagcctagggaacccaacttagataggctcgtcgggtggccaccttgggagaatcacagaacatatacccaaaggcgaagagtcaatcctcagatcatccaagtcgaatttccatgcctttgcaacccgactatctggttgatatccggcacgagattgccattccaacgtactggcgttggagtggttgtgaagatgaagggaaaaccggcaatagcactccatacgaaacgtcatacgtttcaaacagggcatacgttgggttgcatagcccagcgatatgagaagccgatggaattgctcatcattcatcacggatgttccgttccatctccgttcggcatcgtgtatcctgtcattccagttgtcattctcgattttggctcggtactccacggtgtgattggacgtccattgtcctagttgattgccttgcttttagtggctatagatatactaatggaaaagagatattcattaccacaaggaagccaggggggtacatcctgaatttccaatgttttcaaatagggccagtgcaaggagcctataataggttggccttttccatccaaaggacacaaaaagtcaaatggaagagtggttctcgccaacttcaattcccgaaggtgaacgctgagatttcgcaaattgatggccaggctatcaatccccgaagggatgacatttagtccaggtaaactatgtttccacgggccatcctccgagccgttataatgtaacactcttaggctgtcaggaataaccccgagcaaggaagccaatgctatatagctgttaataaaaatctagatgaaaagacatcaaaaaaagtacaaggcttacacgctcgacgcctttgtatatactgtaagtaatccggacggacccattcgttgagatccagctccagttcagtgatggttggacagtgttggataatagtctgcactgttccggtccagatttgatgatgccggtttctgtcgaaattttggtttaggaaagagagcttatcaatgcactgaacgtgcgctaggtatagctcggacagattgttgataaaacgcgcccgatatggggggatcggtatatggcgtctacccctgtaatcgaaagaaagcgccgcactagcggtaggacagggcaaagtatctggttccattctaggccacctaacgtgttgagatcctcgaagccctaggtgcaacgtgagacggcaatgctggctccatgaatgaagtgtttggaaaagatcaaacatagccgtctggaaagcgaaatcattggcctgccttaattggttgtctgcgctatatttgctgttttcacttgtggtccagtcgaatattttgcaggggatgatgatatcgtactccagctttcggatccagtttcgccgtatggaacgactaccggatgtgagtttttgaaaatgcgttagagaaattccacgttgcccctcctctttatggtaactgtcactatagacagcgagatttgcatatatcaacggctcgagggctgcctgccaatagcgacacacataagcgcatggaatcaaagaagccccgtcaattcgcaaaagtgttgcgatttcaaatagcagttccaggggtagtgatgtcgccattatgctagcgagtccataacactgagtatcgaaccaggatgaccttgcaaaagaaaatagaataattagagaagaacgagaaggctaagctagaatcaaagggaaagaaggagttcttaaaagaaagataactagttagaagtagtgtactttataagtgcaggcttggcgccacgttgcttggatgtatcacattctgctgtcagtgtgatagatcgtcaggcgtattgggctagggggtcgaacggagtagaggacctcaatactgatacacatacggagtacatacttatctcctaataaaaaaatgtcaatagttctttaaaaccatttgattttgcttataacaccgacagctcagtgcaggtggttcttctcgccaacatccaaagccaccaaaaagcgactaacacaattataagccgcaatcgtagcggtgatctcaaccacctcccgttcatcaaagcacccccttagctccgcaaaaacctcatcgggcaccgtaaccgtcttagtcatggcgtcggtatactttagtacagccctctgctcagcactcaagactgacgacgcagcctcactcgagaagtccacctggatatccctaataaattgcaatgcctctgagcccaatccaccttccacaagcagaggtgcatgttgttcccattcgaacagggcgccgttgaccactgcgacgcggcagatggctagttcacgaacgacagttgtgagggtggttcgggtgcggatcgctccaataaatgagttccagccttctgtgaccgggtaggagtgtaggagggccaggtcgagggggaggagcgggttgggggctcgacgggcttgaacgctggctaggattctggcttcatccggcgtgctagttgctggagggtctgcaacgtaagggagacgcatgatgggtggtacgtaagggttgtaggtgatcttaattagaagttggtatgttcaatggctggatttgagtcgaatatggggtctagggtttgctgtcagttgagatgtgactcaatatgcagtgctttggagccaatggctgcttggatgagacgcaagtggtcagtacctgattcaaagctgtaagatactattgttgaacaaatcggaactggctctatacgggaatcagcaactatttatcggcaaccccgcgtgggtccatagcggataagtcaaagccgcgggagtcggggttgcgcttccgggttccgcaggaattggtttgatgatgttgaaattgcaggtacgcatatgtgaagagagtaagatgtgaagatgcgaagctgtgaagattgatatcctgtgctctctagggatttgtcgtgcggggtgccagatttaaattcaaggcccaggtgatccaacatcaaatatatccaaggcttatattttctctgtgaatctaagaaaatattcagattacagaattaatgctttatcttcatcttttaactgatcttcaccaagtccatccgcagtcagtgctgtcggtcttggcacatgatccacaagttcagaagctcccaaggtgtcgtcacttctcctgaacattgttccccccaaacaaacatgcctccaaaggcccctaaacctaccagtgacgagcttctggctcagtttgataacctcggtcttgacaaatccggcaataaaacagctaaacctgtcgtatccgacaatgtcaagggcgggcaggaggacatactggccgagctggaccacctagccacacagcgtccagccagcggaccaggtactccgcgcctgtctgccgataagcctaggtcatctacacgatctccccgcccgagcgcgaccatcgaccgaccgaccgaggacaaggcgccggtccgccggtctgaggagacaggccggctctcacgcacagaaaccaagccagaacagcccaaggctgagtctgagaatgtccccgcacagcaaccatccgatgagggtgccggctggtggggtggatggtcggggggactgttcgcaacggccaccgcggctatgaaacaggccgaggcggctgtcaaggagattcagaacaacgaggaggctcagaagtgggctcagcaggtcaaaggcaatgttggagctcttcgtgatcttggtatgaatccgcctactcaaagtatgctctcttacatgtagggctaactggcacacaggcggcgagcttcgagacagggcactcccgacattcaccaacctcatccacaccctcgcccctcctatttcttcccatgaacgtctacagatccacgtgactcacgatatgtctggctatccggccatcgacccgctagtctatgcggtattctcgcgagtgatggcccaagtcgagggcggggacctgttggtgatccagcggggtcaggagtcatccccgaaacgtgcgctcgatgtgaccggctacatgaccagtgctggctggaatgacgggccctggtggcggacggtcacacctggacaaccgcggaacatctcttccgttctcggcgccgtggaaggttccaagctcgctcgagccaacgccgagtcctacgctgccgagtacttctcatctcgtggcggagtcgaagaggccgcaaagcatgcttcggaagtcctgagtgaatccaacccggtccgcagcagcgacatctttttcgctatccaggctatcagccagactacttccaatgacctcttccaggctggcgcgacgggcgaaaaggttaccgaaggagccgtggaagctaatacgcaagaagaggagatttccttcgcgatgtacctccacgaccccatccatggcattgccttccacgccatctcccagagtatccctcaggcatggattgaatggctcgatgattcggttctagattccgagaagtcagacgcctatggtgcgaatattcagcgtgttgtggtgcccgaagccattgccgaggtcatcgagggtggaggtgtcgacccccgcgaatgggtttcggagtggattgaagaaactctttcgttgaccgctggtattatcgcgcagcgatacgtggcccgacgaatgggtgtcggtgagggaggtgtcggcaagggcaagatgcgagctgagcaggtgtccactgtggatagtggcgcaggagaagctgcgcgtgcgctctaggactgccgtgatcctataccgagctcaagagctaatgctcttattcccgaatctcctgttgtttatgtgatacacctgctgacttgtacctgcactagctatttctatttctatatttcagtagttaccccaggctgtctagtagggagaatgaaagcaaatgaccattatcgaaaccgcttgcaaagagaagatcatgtatgggattcccgtatatgtatacaaggatggtgtctgtctctgtgagaacgacatgatccagttggctcgatggtggttctttttggtctttttagtctttttaggtattgtttttatagaacttcttcctgatgttccattagacggcagaaaaaggcttaaattttgcagactttctatgtataaccttaaaacggaccggccttcctataaatcaccatattatgtatgcattcgaaaaccattgcgggtatcgtaggatcatctaaagcatttagaatctgttcaacaacctattcaagaatcaaggtccagcggcccttcaagaccggggacatgccagaagttggctcggagggcagtcacacttgatcacaattagcatatccagttccatccgctcattgcaaaaagaacatcttacctagtcgacccattgagcacagtatgagcatccgtgccaacctcactctcctgcaacgtcttcttcatatccgacaaatcagcagaccacttgaagtggcgctgtctggctggcgcatgagcatgtccattaacatacgtgccattcgtatggccattcatatggccattcatatgaccattcatgtagccattcgtttcgccattgacatgaacaccgttcacaccattaaccttctttttcaccccctcctcggcatacaaacagcccctgggccaataatacggcaacgtgtgtgtatacagcacaggcctctcctcaacatccagaaccatcgggacgttgatattataaagctccacgcgctcatcccagttctcaaacagatgccgcacgactctgacagccagtctcgcggccgcggcaataacatcatcaggctgcggatccttgctaccaaacgagatggcaatcccgcgcttaccacagaacaccgcttccagcgcaccgcctaccgtccccgaggacaggttgtagatggtagaggcattgcggccgtggttcgggcccgagatgacgaggtcgataggcgcgcgctcactgaacaggttgtacagacctagttgtgcgcagctggctggtgtgccgttgcggatcactacccagtcgttttcggggtctggggattcgaagctcgtgtcccagctgccgtcggcgtggaaggcgtctgggtgtacgtagcttgctgtgagggaggcttcgattaggtgggctttgccgatccaggagcgtgaggctgccgggattgctacggagacttggtggccgtttgctttgagggtgtcgactagaggtcgaagatatggtgagaggttggtgcttggtggaccatcatcattgacgacctattttaggttgttagcatttttgcattttttgaggggtttatttttttaaatatctatgtcgtgtgacgtgaactggataatagatgcaaggaatcggaatgagggagtagtagattgtcatgtgacgatggtttccggggaagtatataaagcagacccttgcaggaaatgtctttctatactctgtactccgcacacttgctagagggaaaagaaaggaaatttgccaatgatgtcacttaccaggatgtgcatgacgggcgagattgaacagcgccaaggaggttatgggtgatattcgaggttcgattcggatcggtaaaggttccccggtggcggtctgggcctttctgttctctggtttttcttttataagagaataagaagcagaagaaagaaatgttcagcaccccggaaatatccggggtgcagaacacttatacctggggaatcagggtaagaaggaatgagccattggccacaccgaattacacaccggggcattggggtgaagccgttcatgcggggacagcaatgggccgaatgcagcatgcggtgagccgattcggctttctctcggacatgctgaccatgtgttttctgtcatttgatagatggtcaagggttggcacggagtacggagtatattattgcggagcgaagcgaagcaattatgtactcgtgtaagtgacggggtcaataggataggggatgtggggtgttaatagtgttcatagtctatagttcattgtaaatgcagcttcagtcattcgccacctatattccctacatatagtctagaaatggatatccagtgtgtacaactatattgtatatccatatgcggagtaagatatatataataattagtcggcatcggtaagaacgagatgatccaattggctggtagttcttctctaatatattgtagtcttttcgatgttctttgttatcttcacttgctttttgggttttcttaaccttcgtcgttcaataataatccataacctatgggcttaaatactaataggatctatacttcttagtcgtttttttatagtcagaaggttagtgaaagtccaagtgggaagatgaggtaatcaacgctgcaggggagtgctgcaacctacacggtagaacaaggtctggatggaaattagaaatttcgatttggactttgtcgactggggactgtcgactggaagaagaactgagttacatttaatatttcgcctaatgcgcttgcttagacggagtactccgtacggagtagaacttccgggttcctggaccattcatgactcaggggcgcaccacatttcctctcataagaccagaccggagatcgacatgccggtatacaacgtagagcctgcaacacaatacattgtgataatgggcctttctatatatctatattctcatgtatttcaatttagttgggattccaagatttaaaaccaactcccatgtctatattcagcatagatcgttgtacggagtactccgtaaacaagagcgaaatcctaaagtggtctgtgccggctgcacgctaaagtcgatcgcagaaaatcttgaggtggggaaccccgtcagcccttcaacaatcctctggcccctcaactctctcctcttcaagtcattaccgatatatccattcgatagttacttggacacgttgacaaatcctcgctgaccggcataactccattctccgcccatcgaacctgcgaagtctcaagcgaagttcgttgagatctttgctcaactaggtcgtcgccgctacctcaccctctcatcctgtatggactgtagaagtaccgggaccgctgcggggatcgaccccaagattctggacaattggcaaactgaaggcaccttttctgtcgcctcatgggaacatctgggttacgaccaatcgcccgagtgggacaccagccaagactcgagccagtgcgatgcagatatcgcagacctaggcaccttccatggtccactggctggtgaattccgtcgtctggagaacaggtccggaactccctcctgaagtgagaccgcgcagcgcgatgttgatatggctgacacttgttttgttacagaaagcacgatgtgtcacccgagaacttgaactaccccgatggcctcgtcgagggcactggcagtggcacccttagccctaagaccatcccatcttccaccgacgagaattaccattcggacgaggcttggccacaatttcaactatacaacccagtcgccatgccgatggatgcacctcttctctacccctacgcgaaaggaccggaccactccaatggcgctgtcattgtcgatgatgttgaagagatgcctcacagtggttattcggatgtcccagcggagggcatcatgtcgttccagcagattccacagtcctttcctatgattcccgaggaatggtctgtgattccacatgacattcccgtcgaaaatatgcctctgccgcaagagcccatgctactctcagtggacacacaggggaacccaaaggatcactccctgcggggataccagacttctgtccgatcgctggaatcgcggtggctcaatagtctggcatcccaagtacccgcccaacagatcacctcggtctctccaactgctggcccgcgaaatgcacgaatggggcaggagttccaattcaaatctgagaactcttcagtgtcgggcgatatgtcagcaatatacgagtgctcctattccgccactagcgatgatgccgatgccccggcatttgcggagcgccagatggaagacgatgatttccagtggaagacctcatcgcatgaatctacttcaccggaggggtcgcaacctgcattcaaacccactgccttcgtggtgagtgaggcccccgcggaatctctagtttccactgttccctcaaggccaaggacttcatcaactgctggccaacgtgccaatcgaccggcaccgcttgccatgcagtcctcggctacagtcaagaagcgcaagaccaaaaaccccgcttcaatggatcacggcataacaaggccattgcaaattgtccaggaggatggccaagggggctctattgcgtctgcggactttgtctcgcctccacgcggcgctcgtcgcaagggcccattgagtatggttggacgggccaatgcaggcctgcgcaggaaaaacaaggatacttgtgtccaatgtcgactgaacaagcgcaaagtaaggatttccacgtacatttgtgtattttcataagctaacctgtttgcagtgtgacggaagcgccccctgcgatgcttgtcgccctacacttcatgagcaaccatgcgctcgtgcatgcttctccagtattgtcgagtttggaacctgcaactacatctgtatgtatcgatcaaaccctcccatgaggtattcagatttactgactttatctagctcaacgagctgtcaaccaccctacggtggatggttccaaccgagttcggatggagattccatctgaatttgacctcagtcaactcgtgtctttgctcgccgagcgccagggacggttcaacatccgtgctagccaggcctggggctctctctatgtcctcgacttgggggagacctacaagttcctgaagaccctgagtgagtacaacggcaactcgaagtccactttcctagagttcatcgaccgacgaattgtcgactcaaaggataaatccaagaattggctgtcctgcgttgccgactgcgacccaatgaatcaagcctatgtaagtgtccacttctacacgacaagaacgtaactaaccatcctcagaccctcctctcccagtggaacaacatgcctagccgcgccaaatacagcttcgtgtccctcgacccaacagccgaagagcgaacaatggacataaacaacccagaagaccaacgcgaaatcctcctcgcagcgcaactctcccgaatcttctgccgcatgctcgaagtcgagggcttccgcaagcttgagcgcgacttctacaacataaagtggaagcggatctcgcacgagacgcacgtccgcttcctgggcgaactcggccacattctgctcacgctgcggtggcgcgtgagctggtggaagcggctcggcgatggtggccataaccccgatcctacttcgcagcactacattgaccgcgtcgagctgctctgccgcatcctctacgtctactatacatgcgtgctggcgaagctgccctcctggtcagcggccgatgtccctaagggtatttggtcgacgtatgcggactcggagaatgccatctgggacgatttcccctcggactccagtgacggcggctttaacggttggatggagcgtggccaggagttgattgaacaggctggtgttccgagccgcatctcgaagttctgagactgggatggtagacattgcctgcgaatatggttcggatggtaatgtcattggcgttacaattatagatacccttttttttgctcgtttatttccttctcctcgaggtttcgttccattggatgcatcatgacttttacatgcacgctctgccttatgatttgatgatttcacacatgttctatcctattccgcttggtttccgccatttgtacttaattactatttctcgacatatatacacttcttctcatctccacttcatccatctcgcgtccatctcatactacactatgcatacatataaaccatccaaataaaaaaagacaatagaaactgggtatcgatttcatgcactcatataacgagctctagatagacgaactgcaaagatcgaatcaaacagacaaaaaaaaaacatatcatccattaattccccgcccttcaagtcgccttcttaggagcagacttcaaagtatccttgcgagccaaggtcccatccttccgagccgcattacgctccttcagcagacgatccttctttccaccagccagcagctcgagatgacctgcctttgtcgccagactgcgttctgtcattgaggagaggccggatgtgagttgctaagcagcggtgttagtggttgttcttctctggtctcgtcttcttcttcttgtctcgaagggcacagactgcaatccgggtcgaagatatggggactgggaagcgagtcggtgcgtaccttggtcagtctcttctgcttgatcaggccggctttcttgggcgcgacggagcggacgcccggtcttgttgtcttggcgggcctagagagagtgtatgttagtttgattgctccttagtggacggatgggactgtcggctgtggctttgtggttttgtgtctggcacttacttcctgcctgggcccgtgggaccggcctttttcagtgatccttgcaccatatttgtgttgggatggaaattggaatagagagaattggtgaatcggcacaatagaaagaggtaggcaaatttttgtaaagtagcactgccagcagcacaaagtgattctgggcttctgtctcttttttcgggggggttgctggagggaaaattacttatcggcttatctggatcacgtgtgttgtgggcctggggcatgtattttccgttccgaagtatatttgcctggtggatataattttggtgattatgaagaggaaagtgacgatggaaacagatggtgaataagaatgaaggtggagcaaaaaaagaagaagttaaaggcgagaacgaccggggtcgaaccggaacagttgaggtagtggaagatcttaggcacttccctcgtggtacacatgagtatgttaccactaggccacccactgttgattccttattattacctttctgtttcttttcttttagattttctacggcttcttctcctatgggcacaacatcaatatgatcaatatgattgtgtgcatataagaatcttttaatctgtttctagggcagtgtaagttacggttaatacatatgtatgataattagtgatagacctaggctagcactgcatcttctgtcgatatattatcttgataagcatgcaaattcaagtttcgaagtccagtctacttttatatgaagttgcatcacatattgtcccaatgataaacacatctcttgttatagcactcggctacccatcaattatatacttgaaccaaacctgttagtctactcaccggtaatggtagccaagaaaggcccaaagtaccaggatactttgttttcaagatacaccaatgtcccaagcccatactactctctaggatgaccgtatgcaattgagtaatgactatgatggtcaatattagtaggatgtcgtatgttcagactttactgtttttaccgtttgcaggatgttagatctcagagaggggccctatagtggtatttgctgtgtcacgttcgattttggcaatgataaaacatgtttcggtctcattgaagagtttcaagaacttggggggattttcccggcaagccgactgggaaaacgtagaagccgataactacatggtagtccaggatgccttcaagttgtattataatggtcatgtcctcaaaagtgaaacccttgggacgggtatagccccccacggaagatccgccgccaacagccgatcaaaaaacaagggaatgcactcccgaggcgaggccgattaggttgatcatgtttaacggctccgcagctcgtagctcaggtaccagacaccggggaggtaaacactgccagggaatagtcttgtgcctttcgatgtggaatgaaaccgatggaacaacatagatattttttgttcggtccatgtagagatctggaagatcttgcatatgatgaacgacggcagggaggtgctttgcggtcttggtgtattgcacttaccgccgtactaaaagctacctatcacctggaggcctgatcagatgccccccgtcaaccaacctaccatccactaactcgacttcagaaaatggaaggttcccaaaggatctcttgatttgtgggttgaaatgtgatagcttgatagatattgtacatgatgccaaaaaaaatcccgattactctcgcagcttaccgccagtaagtgcctcggcaagcttcctaacacgctcctgagagacatcccagcgaacagcctcattggaacgggtcttgttggcaagattgaacacagtcggggggttacccaggttccagatgttctcgccgggctggtggtcattgcgccacgccgggttctcgccctcggggaatacccggtcaatttcagcagtgagctgctcctcggttgtaatgaaagtgcgagcattcacatacaacgcctggaggtgctccttccgctcaatttctttctgtgcctgcttagactccaggcgtgcccgagagagggcaaggcgttcctcgcggttggggtcgggcagaactggctgtttgtggggcatcatcgcctcaatgatcgatggccgagtgagacgctcgtcctcacgctcgggttgctgaagaatgcggtcccgccgattctgactctcaagactgcggctgacaatctttgagtctgcggaccttttgcgcgagtataggtctcgcagaccgtcccgcaggttctgtctccgcagatctgccatcttgtgcttccattcttgcttctcggggttgctgctgtttgggctcactacccgttcagacttggggagttgtgtgaccgcattgagatattgtatccggggtttgtccgctcgacgggctgggaagagctcgcgaggcacgggtagagtacctctgatatgaggtttgcgggggttggtgggctgaacaattttcggcacatcgatgaagtgaggcgattctggcccaactcgaagattggaggaggaagcaaatcctcggacctgcacagtggcagtccggctattgcggaggacagacatacggcacaattgaaccctgtcactccgtggagtagtaaagctggcaggggattgttgtaaagtaaattatcaatcaagatcaatgacacggcctccagattaagccgcgacgtaacctgaggttgattaccgtataatagggaggatacgcggtcgagtaagtcggaagaaacagaagcgattttacctggtccgtgcacggtaatgtcttggcgccaaaaaaaaaactccttcgccgccttttatttttcttcctcttctctttgcactctgccactctctgtgtttggtcttgccttcgactttttttttcgtcaggcacttacttatcctctcatatttcataccacaaccgctatcatgggtacaggaaagaaggaggccgctcgtaaagtgcggcagggaaagcccgatgatggcatggccaatgtcaagaccaaaggtgaaaatttttaccggtatgtacagcctaagcaaaaatcctcattattttgtaacaaatactgacttaacacccagtgatgccaagaaggtcaagaccttgaacatgttcaagtctggcacgccgcgccgcaacgcgcagggtgatatcacagttgccgcgacttatcaatctaaagagttgccaacagcccgcatcgagccaaaccgtaaatggtttgctaactcccgtgtcatctcacaagaggctttgacctcgttccgtgatgctgttgcggagcgtgcggccgacccgtaccaagttcttctcaagaccaacaagctccccatgagcttgattcgggacaatgataaagtcaacggcttgaagcaacatcaggctaagatgaccatcgagacttctcctttcaatgatacattcggccccaaggcccagcgcaagcgcgttaagcttggtgtatcgtctctcgaagacctcgctggcgagacagccaagatgcaggacacctacattgagaagaacgacgagggaactcatgccgatggaagcgcaattgttcgcggcgacgacactgccgcggtcgaagacctgggtctactgactacctctcgtgaatctgtcttttccaagggacagagtaagcgtatttggaacgaactttacaaggtcatcgattcttctgatgtcatcatccatgtcctggattcccgtgatcccgacggtactcgttgcagaagtgttgagaaatatgttcgtgaggaggcaccccacaagcacttgatcttcgttttgaacaagtgcgatctcgtccccaccggcgttgctgtaagtctcactatttcccatttgatatcccttttgagcactcggtttttgttttcttttctgtcctgcgttttcctgttatccccctgttccatcgctaagtcaaggcttcttcctgcgacttcggtcgtgcacgacttcggttgtgcttgtttcaatggaattccgtctgttacagctttggtatattaacactggcccgcaccgaatttcgttatgaacctaggttgacttgctttcgtcttgaaggcctgtcgcaaagggccagctgtgttttgtttttgagtagaggtctgcttctgcctatttggtggcgttgtagcagacttcttagtaacatcccacacattctatctttacacaatgtttcattcattgctagtgactgattgctaactttgcatctttgactaggccgcttgggttcgtcatctttccaaggactacccctgtctcgctttccatgccaatatcaacaactctttcggcaagggctctttgatctcactgcttcgccagttctcatcccttcattccgaccgcaagcaggtgtctgttggcttgatcggctaccctaacacgggcaagtcttccatcatcaacacactccgaaacaagaaggtgtgcacagtcgcccccattccgggtgaaaccaaggtctggcagtatattaccttgatgaagagaatatatctcattgattgccccggtgtggtcccacccaacgtcaacgataccgaggaggacatccttctccgtggagtctgcagagtggagaacgttcacaacccagagcaatacattccggccgtgcttcgccgtgtcctgccccgtcaccttgagcgcacctacggtatcaagtaccaggagaactacctcgattggctcgcgcttcttgctcgccagggcggtcgtctcctcaagggaggtgaggccgatctggatggtgttgctaagatggtgatcaacgatttccttcgtggaaagattccctggtacacgcccccacccaagggtaccgggaagggcgagaaggacgagaaggacgaggagactgtcgagggtatcgagggccgtgagggtcgactcggcgagatgccccgcaagcgcaagttggatgagaacaacgagcctgccgccaaggctacggaggccgattccgagtctgagcctgctcaggatgaagccgttgatgctgaggacagcgataatgattcgatcgccaacttggaggtcagcgatgtggagagtggcgaggaggagtgattgctccattggtgttcttcaaggcactcgagtgtcatccccattccgccctacgaaaaacagacagtatgccgccatgagatcggttatgctagctcttgaaacaacagagcttcaagccgagtcattcttcctcatgtccgcattgagcggacctggctctccacaaggcatccggcatgtgcttttatcgcacacaagtctgaagaatgccttgcgatatgtcgtgcaggcctgcaaagcgcctgtcatctaaaagccacgttatcaaccgtgagcatcccagtacataatttgtacaaccctaggagttctggcgttttcagtcaccagctccaactcagatacccgattcgatgaggaatcaaaatgaatgaaaataattcttatttaaaccctttcccgttgttttaattagtatcttagtacgcgttgctctatgatccggtattacacctgctgccgagcaacccgtggatcgtaaggttcggattagttgggttgtggttccacccttcaaccacgggttgaatccggggagagaattgtggcagaaaatagtgacattcttggtcaaatccatcttaactaggcaactcgtaataaaagtgcactgagttcctcttcatcctttcatttgacccttccaaggtgctggacgagctaaaatgggtcgaagaccttggtagtttcgacgatgggtcggcaccatcctcaaaagatcaagcacattaagcccactacctggatctttgatggatggatcagctccagcacgcaggaggacatccgcaacctcaaagttaaagcgaaggctggcaatccacaccgctgtggctccagtacggccaccaggggcattgatatcgacgtctggttcggaagcaaggatatactcgacgactggaaccatcccaaacgaggcggcgtagtatagaggatgcgttccatcaatggctatagcatcagtcgtgtttgaagcagcggttgttcgtaacaggacctgtatccatgtgccataatttccgcggccaggaagagacctcgtagcaaagaatttatggatcatatcttgtttgcgctccccaaaaccgcaggcggcaccatgttgtggccagaagtttgcggcgcaagtcatgaaagcatgatcttgtcgtactttggctgggttttcggggtatttcaagtatccctgtgcaaagttgtcgagacataggtacgtgagacacctgtgcatggctttcaggtctgcagttgcagcatctagggcgaaatattggactcgagatgagcggatccaatcagatgttagaaaatctttgacagacgcatgcgcgagattcagataaccattttggtcttcagtgatgagtccttgacaaatgtcaagaataatatggggcgggacaagcatcatatcctcatcgagtgtcatgcatgtctcatccgtgaccacaacttcgttgagactcctcaaagtaagaggctgtttggtgaagctgagccaaaagagggcctcacgagcaatcttccagtcgtcaggggcaattcgttctaacatacttgcatatgtctcgcgtaaagtccctgggaggttctgtaaggcctgtcgcattgcccttacagatcgctgcgcgctcaggttgtccaatgagagctggacccagcggaatctatgaataaataattagatcacagaaagcatagtcagatcggtactgtactgacgatccatcggcatttccaagaagagtggattcaatttccgctcggaattctggtgccaaattgctcaatgtactatcagtctgaagtcggtatttgataaaggtgtcaatgtcccctcgtgactttccgcttatgttcaagacagatgcattggggtgtctgatggagcccatagtgcttgtggtagttataagcacgcggatgttcgtggataaactggcaagcctgagaagggaggcttcaagaagctgcatatcatggctttcattgattgcatcaaccagaaggacaatcttggtcgttccggaagcatatttgaggatggcagcttcgagaacagacaattcgatagggaacctatgcgcctgattcttcgggcctttgttatagatagaccgaatatcacccaaaattgaaggagctgtgcccgagagctgtgccacaagtgatcctaggacgttccttgcattctgagaggcaaaatcactgattgtacaataaaaataagcaaggcacatggattgaccttgagaagccatataagtgagttcatttgcaacttgtgcactagcgaaagtcagatataagatgcaactgaattgccaaatggaacttacaagagcgtagtctttccagttccagctttacaactatgtcagtggaatgtcttagaggttgcgatgggtacatacattttcccaggaggaagaaagatcgattttcttcttggttgagaaacatcttcaaataaccgtcaacgaaccatctaccagtcccatttctatgtctttttgatgcccgcagatgagagctttcagggttcacgggagcgatccattgtagaagctctctgttcaaaaattggttccgctcttgagctcgaatgtgcaagtcttcttttagtgtgtttgtcagatcacgaatctcatgctgcatctcccgatccaccgaattatggtccgccatgagaaccagtatcaaccacgatttgactctttccagacgggccagatggtcgatgacttgcgtctgagtaaatggccatttcagagcttgcttgaggcgcttgaactttgtctcggacgtctccaagtccacgagcaaggattgaaggaactcgtttgttgtgtgcaatactctcgccatgacgtcgcggtcaaataggcttgtttccgattcctcccatttggcgatatcagtagaatgtgctgccaggtgctctaagatcccctttagagcgaagagctcttcgctgagttttcgcacttcggactttgcggtctgcaccgctttgccatacctgatcaggctcgacagcacatggctgacctctattacgagaccggtgatagagatcgggtccattgggattcaaatcaggctaaaactggggttctgttcaaggtggttatcaggctgacaatagctgtgtgcgttgtgtaagctgcacccccacctgggtacctgggcactcatagatcagcctcatttcgctgtttcagacttcgtaaagatgcccgaattgggtctcaattcggctgaaacatcgagtctccctgggctaaggtataattaaactctaactctcctcatttcctataaagagtaccaaccaggcatataaggaaggtcaggagagatattgattcaaaagtgtcactatccacaaccgtaccttcaccgcccccaggtctacatcgtcatcaccggcagcttgcacccttattccctcacgtcaatgttaaaatgcccgccgacatgtctatgattccctataacggaggaaaccttgatgttgttttgtaagtgatcctcaaatatgtgctactggttatctaattgtaaaaggcggcacaatgactcggtggttgtctttgaccatgattctcagcagctcgttctccgcaatacgtcagatgaagacattgaccatttggagctagccaactgcccattctgccatcgctcaatgcgcgagaatagcagagaacgacattgtggggatactgagcccgaaggcgaatttattaatccaaactactttcacatgctcaacaatagcctccccagctctgcaacatcctcgactcctccttctccacgccatcgccttgttcagcctgcgctgccccgtcggcctattaataacgcgtccgtccaacctacatcatctccacaaccaccgccacagccctcaccacagggaatttcctctgcagcattcagtccagattacttcaagaggttctttgtggaggaacgagtgttaggcaaaggtggaaaaggagtggtgctgctagtgaagcatgtcctggatagtgtgtctcttggtcattatgcctgcaagcgcgtgcccgtcggcgacgatcatgagtggctagaaaaggttctgggtgaagtgcagctgttgcagcatctctcacaccagaatcttgtctcgtaccgtcatgtctggctggagaatgcaaagataagcaccttcggtccgagtgtgccttgcgcatttattctacagcaatactgcaatgccggggatttgcatgattacatctgtggctctgttcaaacctccaccactgcgcagcaattaaaggaccgccttcgccgtaaatctaaaggcgaaccggaccctcgaagcaaactcggaggggctcgtacacttcaactagacgagatatattccttcttccgtgatatcacctctggactccggtatcttcacgctaatggatacatccatcgtgacctaaaaccaaacaactgcctgctgcacgagaccggtgatggcatcagagttttagtcagtgatttcggtgaggtgcagtctcaaaatgcaatgcgcatgtctactggtgcaactggtactctttcatactgtgcacccgaagttcttcgtcaagaatatcctggcggaccattcggcaattttacgttcaagtccgatattttttccctcggaatgatactttactttctatgtttcgcggctcttccatacgcgaatgccgacctcattaacgaagaaaaagaggacttggatcagcttcgtgcagagatcaccagctgggctggatttgaccacgcacgcgccatccgctccgatctccccgaaaagctgtataagttcctagagcgcttgctctcggttgatcccagtcgacggccctcagctgacgaggtgttaaatggaatccaagtcggcgcaaattcaaatgagaacttccgcttcagaaaagccagctcgggaagctccgacctgcctggggcggctcggatccgcccattggatagccagcagccatctgtagagcgagcactttctcccaccaaaagtttgcaccgaaacccagcatctttccggggtgactcgatgtctgactctagtcattttcgaagcagtacggcgcctgtgtctgacaccaacgcagatggcccttctgctagcccagatcaagacatgatcatccggcatcgctactctacttcaccaacttcttctccagtccattctcctcatgaatcatcatcgcccctcgatccgcagccccagcctccgctccctcaacatcatctcctcccacctccaccgagtcgtttccccttccttaattacctgacatctttgaacccattgctatcctcgcctgtcttacaactcactctcttccttgtcaagatcatatcccttcttcatccatgttcaccgctggccgtcaacccctggatcctttaccctctccttctctctgcagcatttactttgagagcccgcagtatccaaactcagactcttgccgtctttttacacttactggtcgtcgggctgggtttccgtctaggcgccctatgtatctggcgcagaaactcggatattactttgtgagtactctaattggtatgccttgcatctattatttcctagcacttttaatgtacatctacatgacactcccccaacggtgcctctattatcgagtcgatgatgtattccatggaggcaagcagccctcaatgtattacttggtttttacacaatcagtttagtcttccatgaattgacttactagtctagggtctcagacccatcaatcatttccggcatcgactctccctgtagggcagttccgggctcagtggggaaatgtccctaaacatgcccgttgagcgagaagggatccacagcagataagcttcctcaaaacccggtgacctttaccgtgatgagcattagaagtaccgggcatcgcttgtagaatatgttggtctccgactctccggtgctcggtccattgctcgcagctaacttagttgcgacagaaactcttctactcttattgaatgtatgtgcctgtgggtttgtctgggacacattctcctctgccgacaaatgattggattgtgtcgagatgcttcaatctacccctcaaggcacgttccccacatctccactggtctgttaatttacaatacagtaacttaccagacgttgcaaatagtacagcttcagcacgataatttgaaacggtgaagccagtaataaaacatcacatgacgaatgtttattaattctactcacgtggacgggccaatcgcccgttttagcggctgcgctgacaatagcgtagactgcgatttgccggctggaagcaaattgcccaatcatttggctacagaattccacggggcgactagggactttcgagcaattagatgccggaccccgacgttgatcagcttccctatttggtatagtgttgcggccgaggttgtcaactcaggtacaactctttcatcttcatatcgacgtagatggaagaggaaactgatcgtcatggcgattgtgcaagtatatgcttgtaaccaatccttgtaacgctgacagatgctagcgcttcactctcattttaaccgatatttgatcgagtctgttctcatcccccgtggttgcttgatttgatctcattgggagacgagtacttgaaacttgccatcgggtctctcggggaaaatatgcgagctccagttctaggctggacgctcgtgtacaagcattttagatgcaggcttgatttggtcggcgtgcatagcgcccacatgggttgaagacaagcaatttccatcatggcttgtatccaaatatcaaatataaaaggcgctccgttccactgctgttgaagacttctttcttgaacaacgacaacttcttattcttccagaagaatcgagctagacaatccgccaatatgcatgccagtgctcttgttggcctcttggccctcgccgccgccgcgactgctgctccctacaaatctagtagcgctcactcgagttcttccattgcgaatctgaagtcccacgttaagaatgttgtcgttctcgttatggagaaccgctctttggacaaccttcttggtggccaaaccattgccggtctggataaccccatccacaatggtcctttgtgcaacccttacaacgtgaccgatccctcccagggacaccactgctcagaggccaaggactatgactccgtgactgatgatcctagccacgctgtcactggtaacaccatggagttcttcagccagtggactcctgacaacgccgccattgccgatggcaagttggttcccaacaacaagggtttcatccacgagcagattcacaaccatggtgctaccgccaacgagactgtcaaggctgtgctggccaagcaagtcatgaactactacaccgaggcccagactcccgttttgacctcgctggttaagaacttcctgaccttcaaccactggcactctgatatcgctggtgtaagtggacactttgatatcactgtttcgagactattatactgatttcaatatagcctacctgccctaaccgattcgctgttgttgctggtacctccgctggccacggttccaacgatgccactttcggtacctatgccttcacccagcggtccatcttccagcagttgagtgagaccaatcacacctggctcaactactgggacaccgctggtggtaccggtcctgaggcccaatggttcgcctggaccaaggccaccagcaacgaggataagattgtttccatggagcagttctacaccgatgccgccaacggcgctctgcccgagttttcttacctgaacccctcctgctgcggtgttggtaccacctccatgcacgacagcggtctgatttccgatggcgaggctttcatcaagaaggtctacgaatctctccgtgccggcccccagtgggaggagactctcttcgtcctcaccttcgacgagagcggtggtttccacgaccacgttcctccccccctggccactcgcccggacaacctgacctacaccgagaaggctgccaacggcgaagagtacactcttgaattcaaccgtctgggtggtcgtatccccactctcctcatctctccctgggtcaacaagggctacgttgagcaaaagggtaccaactaccatggccagacccagtcctattcggctagttctctgctccgcactcttggttacctctggaacttcgaacctttcaccccccgtgttgaggatgctgcctcttttgagcacctgatccagagctctcctcgcaagaatgctcccaagacgctccctatcccccacgccttctcccgctagatgtgcaaatgaaagggccgcgaaaccggcggactgggtaacatagacttcatctaaactgatagtattcggaattcaatatacagatttactttatattgataagaaaccatagcatccatagctagttgaaaattatagtaggtgacagtaggacaaaagtcgagacatacgcattcactccaaattaagctatatacaggtgtgatgtcgagagagaataaataaaccacacctccatctatcatccccccagacagtcaatactcccgtagctgctctgaacctccccagaggagaagcacgagtatcatacgatttctctcctgttctggcagaattgtaggagtgcagccagagaagccctcttttcatcttggacttcagttagtgagcgataccatggtttcccatctctcgagcagataggggtatgcaccttaattttccttaagggtaaacccagaagaaattggaagcccgttggttagaggaaggaagaaggagaggaagagtgggagagggagtggattaggaagacaaacaaaacaaacaaacagtcgcatgcctgttttcaccaccacctctgttcaagctactataccaatatgagggagatatctataagagaccgttacaattattgttgataaatacatggatatataggtggattagagaagagaagcccccgacccctgcaaaactatcccattcgtgaagctttgaacttgctcacacgtttaggttgatcttcctcaggaggcaaagtatcctgttcctcgtcgtctttaggcgcgccgttgatgcgtctttgcatattgaagaactccgacgcgatctgcttctggtgaagctcctcgtcatagtgatccaattcaggagccactgcggcccctgtttttacctgtcgctcaaagaccttttcggctagagttcggtcatgtgggaattgaggcggagaaggtttctcgattacatcggagatcggtgcggagaagggtctgggctcttttggtctcgcggggaagagaacaggcggcaccgcggatggagttgtattggcttgtttgcgaaggcgggattcggtgacttgtacgggatttacggttgtagccccagtagtaacagacccattagcaggactagctggagcagcggcccgagcacttctgaaccgcgacgcctttttaggaacagtgggggtggctggagagggctccggggcccggttagtccgttcaacaatggaatcagcgagcacctgaggctcggcccgtacagcagaagttctctcggcgatggttgggggtgtgggaaccggtgcgatatcaaggtcatcagcgaatgcaacccgtttcttaggcttcttgttctctttgatggatgtttcaacctcagcaggtgtcgcgatctcgtgctgcacttcctcggggaacgtctcgatatccttgcccatgttcatcaggcctcgggcattgagcttggcctctaattccatcatctgctggtggtattctgccggaaggcgggtgtgagagcggccgtgttcgtcttcgttatcttcctcgtcgtagtcgtaatcgtattcctcatcaaaggagatgtcgcttccggactcatccatttccaactctgccacaatagcccccacctcgttgatcccataatcgagcatttcgcggcgaagtcttgcttcttccgcagattcattcacgtccgtcacaggcggctgcatgcgatcttcggcagtcacgacagactggggttgaaagaatttcaaagatgcgccgtttggctgaatgcttgtatcatcgccgcttgaggaatcgttctcatgaatttcagccttcgagctgaccggattacccaccacgctttcaagtgtagtatcgacaggagtttcagcagtcttttccggcccactcgtttccggaatatccttgacaccagccttcttcagcacatctagcaattccgaagcgtcattcccgggcgtgttgatcttgctcgagacgacgttcccatcctcatcaagctcttccataatctcctgcatcgggaactccacaccatcctgcagcagtggctggtcattcgagaccaaagcgtccagctcatattgggccttcaagagcctcttctccatagtcgcaacgttctgctgcacgtagtcgatgcgtcttccaagaagatcaaccacttgcccgcgagaccgcctcacaccttgcgaaccaagtattgtccgcatttccttctgatccaccagcgtgccgccaaattccagggccgcggcaaggaactcgtctgtaccagcatcatcttctaggttgctgatttcctcgcggagtccatcgtattccgcttcccaggttcgccagtggtaaagcgatttctgaagttggaggatgttttcttcgagcgcgaggcgctgctcctcaagagcatcgaggttagggttcagtactcccattgttgtgaaagctaaaactcagcggcagctttacaccgactatgtcaattggaacggagcaaagagaggggttgccggaggcaaaaagaaaaaaagtcgcaaaaaggtgacgagggtgtggtccgtgcgcatgggttgcttatcagcctcaacccagtcagtggtccgtctctcccacacgtcactttactttcaccatggccaccgatgcggcttctcgccgtgatgaagacggtaagatgatataaggcttcgtcgtgacggcataatgctaaccatatctttgcgcagaggtttgccctgtctgcaaatcgtcgcgatacctcaacccggacatgcgctttctcatcaacccggaatgctaccacaagatgtgcgagtcatgcgtggaccgcattttttcatccggtcccgcaaactgtccggtagccgggtgtcgcaagacgctgcgtaaaaatcggttccgcaagcagacattcgaagatatcggggtggaaagagaagtagatatccggcggcgagtcatgcacatgtacgtgtcttaccaaacaccccgacgtaccgtgtaatatgggagggctaacaattcacctcgatcagcctgaaccgtcgcgaagaagaatttgactcaaaacgcgcatatgacgacttcctcgaacaaagagaggacataatcgcgaacctagtaagccgcatcgacgtggcgaaaaccgaagcccagctccaaaaatacgcagcagataacatgcaatcaatccgcacaaaccaagccatcgaagccgaggaagcttcctcattccaagcccgcatgaccctcgaacaagaagaagcccgattgcgccggcaagcggtacgccaggaatacgagaccgagcggcgcgagattcaagccggtcgcgaggatttcctctcaagactcgcctccggctcatcgacagatgccgcggccatcgcgcgcgaaggacacaaggtgctgctcaagaagtcgtccgcgcgccgcagcgaggaggaacgcattcgacagaagcaggctgcgctgcggtcggagaccaagcgcgggtcgactctttccacagtcgatcatggtggtgcagcggatacgggtcttgtcaaaggtctgcgcaagatcaagacgcccgagccggagaagccgtacgatccctttatgggctatgtgcccgacaagcgcgattattacacgctccagtcgtattatccgtcgcagtatcttgatcctattcgaaatgatgcgcggatgctggctggtggttatgatttgcgtgaatactactcgcgcacactgcttgaggcttttgctgggttgagctgctttgttggggaggagatctctcagcgagatgctgctaatattacgaagtcgacggctacagagggtgctgctattgccgcggagaatgagaacactgcctgaatgctatttcgacttaggctttggggcttgcatgtatttgtattgttttgtgggctattgagcatagcgatggcgtttttttatttttgttcgcttggggtattacggccactgcatatctaaagaggttcaaaacaagtaaacggtctgaaaagagacctgcgctaaattgaacaagggatggaagaagttatttccaaggccgcggtacaaccgcaatgacatttaagtaccaagaactggctacttaaccaacaatcgattacccaaatcaaagaattaaacatacagatggaatcatactccatgaaacagcgccaaagaagcaaaaagtaaccagaaataatatcaacaaacgcaatgcgatgcaataatcagctcagaccacgcagagaaaggtggcctgtcatctcagtagtgctctcaatgccctcccaaggcaaatcctcttcatcatccaggtcgatctggccgtgacgagaagacttatcggtagtaccagtgacatcaggtgcatgggacataccgacgtcaattccaattgactcaagagtcgcttccatttcgtgctcggtcatctcacgaccgtcttgcttttggccctccaaaacatcgtagagagcgtagatttggtcggacttcatatcgatgtccttgaaaattttatctatcttttcttgcagggccttgcgcgggcgcttgccaagggatgcgtcaagcttgttgtaggcgctttgatatgtggctagttgcatcttcaggtgagaaagctcgtcttctaggcccttgagaacagtagcaagagcgagggcaggggcttgcgaggggcgcattgtgggatcttcgttccagacggatggcttgggcatacgctctgacacaggaatgggtttgacgatcttcacagactcgtgactgcaggtgccgtcagtggagtgacaattgcaaactgtgcagttctgtccgttgtgtcgagcaatgctatccaatgctttctgggtggcttgtggtagcttagataggtcagccgctgccaagtcgatgtgctgaagggtgatatcaggaaggatgaaagcggaggtcatgtcagtgacattacgctgcttcttgcgctgggaagttgtaggcaacgaattatctgaatggcgccgggaacgctctgcagtaggtactgtgagactactgtctccatcggcattttccttcgaggcggtggtaatatctccagtagcagaggctgggcgagggatttctgctttggactcgcgaagagatgacttgcgaggggcaggggttttcaaaatgctctgtctagtcgaattgacagtctctgtaggattggattccttaggggcactcgaacgtcgttgcttgcgcatcattctttcttcttctagtgtcttgcgtagacgagagatttcatgttcatcaataacactcaacagagtaacgtctgtttcagatgacgcccttgtctgctcggacacctcgggtccagtcacatcttcaactaccactcgcttcacgcgctgtttgctcgtattgggttgtttccgggagctctttgattcagaagagcgagacacatactttgatggcttagaagttgatgtacgccttgattgaggcacctcaatagagaagagagcctcatcggcacgttccttttcaagtcgagaaaattccctgtccacttgagtagacactttggagcgggagtcatcctggcgtctggtccttgtggtggagcggttgctttttgaggtaatgtctctggtgctccgactagcgtctccactgcgctcagtgtaaagttggctgtcgtcggcatcctcagacacggctgaactagcgtcggattcgacggtgtcctgttcacgagccttgcggcccctaagtcggctgatctgggacttgagatccgcattttcctgtcgcaattcatcattctcggccttcagctctcgagtttcgagataagcggccccaagttgtgagatagccgactctctatcatgattcaagcgcttgatggcagactcttggacctgggcctttcggtcggcaatgtccaactggttttgtaaagcgagattggctgcgtctaacttttggttctcgttttccaagcgcttggatccctttttgtgcgcattatcgtctggttcgtattttgccgatgactggcgtggtctgttcgccttcaaagaagaattttcctggcggtagctgtccaatcttctctctgcctccgacttgaacatctccagttctgcgaccttatcctgaagtagtctcagatggacaaacaaggccttctcatcttcggggacgggcactgcatccagcggcatatgctcgtgggggagagacacgtctgtatgatcatgaagtggggaaacaaatcgggtcgagcgcatcttgctctgtcgggagtaaaccggtgtgccatcttcgtacacaccggagacgagttcagagatgttagggaggtcgggaagaaggaatgattggtgggtcatggtatcaccgatagtgttggtgttggctgcattggcactgcttttgcgaggagtttccgcggcgttggaagccgatttgcgaacttccttcgcgtaggcgtcccgcgaagctcgctcgattgcgtctgcaatctcctgtgaggtgtttgcgtttccaaaacgcgtcgaacgcgccttcgtcgcaataggggctggtcgttcgtctcccaaaaatgaaccctcgtagctgtcgcgcacttttgcatgcatgtcagagaatgtcctccgctggtcacgttgagccttcgacacttgcgggctcatggtttcttgttgcgcttgcgtcgctcgtcgcacctgagcgttctttcgtaggttttcactgactgcgcgacgcgacggacgcgtggccgcaactggcttttgtggtgttgggtattcaacgcgcattgcgggcgaagatgagcgtacactattctcgaagctcatcatggagctgcgcgagtcgtcgcgcggtggtttggcagcaccgcgtcccacctcaacggacatgtccaaatcgctatgcaaaaaatcgtcgtccaactcgtgttcctcctcctcggaggtctgtatttgcgaaaattcggggaaagcacggtctagtgttgatgtgttgatattgtagtcaagctcctcgtcaacacgtcgtgttgaggtacccattatttcgtccaagtttgtgagcgaaaatgaatcgtcatgtaagccagaatttctgtgcattggaggcattctaagagtaaaagggagaagttgaagatcggaggtggtttgttttggagcaaagtcggaatgtttgggtcgggcgcgtctcggcaaccccggggattctgattggttcaaggcccccacggccgaactacagaatcgaattgttcgacttctttatttggcgttctacttggatgtagatgattgatatttactatatttgcttgaatgatactgtatgggcagtgttggggtctcttagtagatacaaactttgggtgttagatacgtatgatactccttacacttcgaaacagaccccttctatatttatgtagtctcttaatgactgtgatagctctctagatatagttctatctatcatacacagatggattgagccttcaccggcaaacagaacaaatctagtttatatcgagcacgaaaaaggtttccccatattcccatcctggaatttcctgatctgtttacctaaattagcaagatggaatggagacggatttcacggaactcaccaattcgaagatacttgcataaactccacctccgaggactgcgattccgattaggaaacagaccagattgcacacagcatgccagacatttttccggtcatgccaattcccgtctttcagaagtaaaagccacatcacaggagggaaatagaaagacatcccggagacgagcagagccgcactgatagccatgagctcggaaaagaaggggatactttcggcaactatccaagcgatcagggtgacggcaaccacgagcgccagccaggtgacccatcccttcaccgtgttgacgtattgaaccaccgaatcgcgataaatccgcgtatggatgaaccgacatacgaccgttgtattgatagagccagaaatgaagatcacggggagggcgattccaaacgcgattttggacatcacaggccccgcggacagcagagctggggattgaacatcctgtccgacaaatgcatagatgatagatccggtgagcacatagattgagatttcgatgacgccgagtgcagttatcgatttgacatagtctttcggcgtatgcatttcgttcatgaatgacggcaaagcaccagcaaaggcgtaggcaaagacgatgttgctgatagcaaccgctgctttagggaacgtgacatcctcggccggccagtaagaccagtctgaactcgctaatccaccgggcatctgagcctgttggattccagtgccgaccatggtgactccgattgccagaatgatagaaacgaagtcaacatagcctaggattgcaacatcggcgaatgttggcggtatcgccaataagagtagaatgacagcggagataccaccaaatactagagcgcaaattgtactctcagtaatatttgcaaaggcgatcatgcccgtaaggcagtgggatccaacagagagtgtcagttgaaagacgaatattacactgaacagccagtagccaaagctccccatcatcagctgcccaatgtctccatagtgggcaaccgaagggaattttatcttgactgctccgatgatgtaactggtataaatggcaacaattcccatgccaacgcatatgactataccggggatcatccctagaacggcaaatgcctgggggagactcagtgcgccgagagcgatcgcttcgacgatgctgaccacagtgagacgcttccacccgagtcgatggaagttagcatgtccctcgatcaccctttggtcctcgaacccagcatcaccgtcatttgataacaacttggtgttttcatcggcttgtggttgtgggctggcacagcccaccacgggcgaaggaccgttatcgccggggtggaaagagccgtaacccctctcgtcggccattgagaatactcaggggatgctgaagatggtatcctgaggtgtaaagtagagaaagaagagccaaatacggctacggggacatataaacacgcttatctggttttcttgctaaaaatgcaccgagcgctctcatgcggggatgtcataatcccggctggatattccgaatgttttgactcataaactcatccgttgaccactcggatggcatataattctcactataacagcatacactatttacctcaagctttgtgcaacgtactttacctgctgtttttctgctcttactcaagtaaaggcgttgattcatgactggaatgttgcttatctccgattgaagtattttccgcgcgctatgcgccataattgcttcaaagacgtctcgtgtcgtctctgctgtcgtgtcgtctctgctgtcatgtcgatcgcctgattagggctctcaaatagaaacaccgaggttcactgcacaacataatgatttcttccaaccttaaaggttgcattcaccgacagcgatagagtcggtgatagagtcggccgctcgactgttatcagacatcggcgctatcagccgacaccggccttatctggccccactaggccctaagcagtaaaacaagtttctccacattactgataagcagatagtaccatgtatgttattctagaagacatgtaagctaaggtaagctctttgatttttatattgctatcttggtactctccgtatattcgaggagcgtcagcaatggccaagttcgatttgatcatcgttaatggcaaggttgtcacggccagcgatatcaggtaaggtatcggatttagggagtactaccagaaatttaacaaggtttctagtatttgctgcattggaataaagaatggaaagatccgagctctggttgatgggttcacggacgaggagatagagggagtcaaggtgatagatgcacagtgagtaacttctacgcaaaagctgtgaggtttctaacactatgaaatcaggggtgcgtatgttatgcccggcggcatcgatgcacatgttcatctatgccaggatttgaagacaggacctcatggcctgggcggagaatgcgccgacaactttgaaaccggctctagaagtgcagtggcgggaggaaccacgactatgattacctttgcaactcaaacgcgggcagaagaagaccgcagtctgctaaatgtagtcaaggcatataattcccgggctgaagccacgggtagctatgccgactacggctttcacattatcattgttcgaaacgatgctgatgtattggagaacgagctgccagtcttgatgaaagactggggtatttctagctgcaaactattcttgacttacgagacccagaaattgacggactcgcagcttttggatgtcatgtttgctgcgaggaagaattttattaccaccgtgagtggcttatacaaatgcgcgaatgggagttttaacgtttgatagatgattcatgctgagaacggggacatgattcagtggcttacaagtaagttcatgagcttactttctcgttcgaaatttaacatcaacctagacaaactcgaaagcaagggaatggtcggtatgttttaccctgagcttgtcatttaccaaattcctctaacagcctcaagccccgtactaccacgccctatcccgtccgcccttggtcgaagcggaagccaccaatcgagctattgccctcgctcacttgatccagaacccaattctattcgtgcatgttggatccgcagtcagtttctagcggcaatgaaattatctatttgggtactgattttgatagcttggcgcggccaatgtgcgtaaggcacaaaccatggggctccccatttacgctgaaacttgcccacagtacttccacctgacctgggacgacttggtaagttctctctatatattgcgtttggaatgatcaggctaatcgctaatatagaaacgcttccattcccccacgtgctttgagaacagcaagatgatctgctcaccaccaccacctccagatatatcagaccaggaagatttattcacgtgagtatcacctacacttccagaaccaaaaagctaacaatgccagtggccttcaaaatggtactttcaccatttattcttcagatcactgtcctttccgttatgatcatccgaacggaaagccatccggcgtccttgagcatgagccgagcatggagggagagaaacactgtcacggagatgagctccagaatctcttggagcggaaagaaggtacttttcgattaatacctaatggtattcctggggtagagactcgattgccgttgttatatactggggctctggcaaccggtcggattactgctcagaagtttgttgagctcacgtcaacgaatcccgctaaattggtatggatcctcacctttatataaggatgctctagactgactcttcaagtatggtctatatcccaccaaggggaccattatgcctggatctgacgcggatttggtaattgtacggtccctccagatatgtcaagcttttcaagcctcgctaatcatgtgcaaatagtggcatcctgacaaagattttgtgcctttccgcttgactaattcgatgctacaccacaacgttgattgtaagtacctggtccctaatcttggttccgtttactaacgcatctggtcccaagatacaccttacgaaggcatggagtttgtcaattggcccaagtacactattttgcgtggcaatattgtgtgggctgatggtgaagtgcaagggaagccaggagatggcaagtatttaaagcgtggtccaagccagctgagccggtctttctccaagacgagtgcagatccacgctatgtcgcttcttggctctacgattagtccgggcctgttcaatttcatgtattgcagactgcaaagttttatgtatatattctatttgacaatccggacgaggagacaatctaaatgggtcatagggggccatgtcttatctaggcatattcaaagagtagattgaaaaaaggatagagaagagatctagaatgacctatatataaaggacgagaaagatgttcaaaggatgatgtgggcaagaaggcctagctgctttatctcttcggtctagaagtacctttgaatcaaccaagttacactctgaataaagtttgctactagtacggctcgggagataattttagaagaatcaattctaagaatcaaaggtttacggcaatgtcaattgtcaaactaatataaagtctcagatagtacacttgaatcccaaattccctgtctgtcaaacctaactaatcaaaaacagacagtctaattaaatcccaaaatgtccctgtcaaatcaaagtaatcaaaagcagacagtctacctaaataacaaaatcttcttgtctgtcatatccaactaatcaaaaatctcaggtagtatatttgaatcccacattcgccttgtccgtcatatccaaccagtcatggtcggcagccatgtggttttcaattgcctccgcacgcctcttgttgctgaaatggcagactagtccataagctgtaatagcgaacattgctacgatatagcagacaatcatggctatggttccaccggtatactccggggcttgatcggcacggaatgtttgaggtccgatgatatttccggtagcccaagcgatatagaaccaggcgtatagggtaatcctaaaatgcgttagatcagggacttatcttttgagagctgtaaggtcttacttctttgtgtggccggcaacattggcctgatagaccgaaaccagggtgatgtaaggggcccagtatgtgcttgaagagggttagcaaaatgtaacgcattcggaagtttattataacgtactataagatgctgcacagaattaaagtcagtaagagtagatagaaaaaggtcttggagggaacttactataggccaacgagctgtccggcgaggttggttcgcggtaacgcataacacaagatagcaccaagaagcggcagaagaatggagactgccacaataggcgtgcgatattttctggtggtagcggcaatataggataggccaattccagacagggtgctcatggctccaggaggcatagcaaggagtgaggtctgaagaggatcaaagccaaggccggagataatgagggtgttgaatgtggtcagcccaccattgggtacctgcaaagcaacaatggcgatccagatcaaccaagtcttgatgtcgaagatagcctcccagacctgttcaaccttgaaagtcttagactcgacaccggtgttatcggctgccttgcgctgaataacgatgtacttttcccggggggttaggaacttggcttcaagtgggttgtttggcctgtaaagttccatcagttccgctcgacattaatttggatagaatggtggcatacagcacgaagtacaccacaactgatgtaacgatggtgagcgctccgacgagaaggaagataatcttccatgtttcgaatgagccagggtaatatccaacgacccaggcgaggaagccgttgatgatcggagcgaccacgttgagaatgatactgcatcactggtcaatttatgcttctacaccataggatggtgtgctggtacctgtttctctttggttgttcttcaggccgataccacatggaaacaaccaatgtgaccgctggaattaggagtgattcgcagccacccaggagaaatctgcagacgaacaagcctccaaaactggtgcatgccgccatacacatttcgagaacgccccagcagagaacattgaaggcgaagaagggaacagcaggaaccctaagtcagtcagatattgagttcgaattaagcttctcgtgaaagtatgatagatatcttacttttgcaagcagaaggccaagggtcccatgaatgccagtccaccgaagaatggcgcagatccaacccatgaataatcatttccggtaaggttgagatctttcttgatgttataaatagcagctgccgagatagcagtcttgtcaaggcccgatagagtggcgcaaacaaatagctattctatgttagtttttgaagagattcaagaccacacagggctggggcttctcacagtcgggataagtctccaatcaattctgcgcatcagtttcttttcctcttcaacagaccaagattcaccatccatttgatcggcatagtcgctgataatttgggcggcgatgtcgacatccttgtttcttccagccttgattgctttaacggctgcgtctgctgcaacctcgccgcctttgggttcatcactgacggtaacttgatcaacagctatcgtagagttgcagtatcgttcaattgggtatttggctttgattcaatcaggtgggatcttagggttactcacagcccgaccttatatatgcaatgcccatctcgcactataatcttttggtcggaggttattcctcgggcttatcgataggcttatcggctccgatcgtcttggcttccaaggttcaacgcgcgatctcggccaaccttgggaccttcaagccatggaacgcccgaagccacctgactagtcggtgggtccccttatcaacccccgacgataacgaagtggagtggccacgtgaatgaggctgatttttagttggccgcgcgggcaaatcgatccaccgacggccaactacacgataatgtggtcaggccatccactctaaacgcggaatgcgtgggcttgggtgcacgctagctgttttaaaatactcgcgagggtatatctataaatgaagccactcatgaaatcgaacatcctcagaggttttcattgaatcatccaaaaccaaatcgttcaaaatggtatccgaaacagtcgaagagaagcggcctctttaccccgattatctccgtgagtaacatgtccaagagtaggagtctaagcaggattaacaagatccatagcattttatgaccccctcgaaaaggtcgagatggtcgggccattcgagcacgacgaccctggtcatcgagccgatccatcattcccgaatctcttgaaaaaggcgaccaatgttgtccaattgagccctcactgtggaacagagcttaagggtgtccagattgtgagaatatacgctatcattatatcgatcggccgagctaatacaatcgcgaacttagtcggagctttcaaccgagggcctagacgaactcgcgctcatggtggcagaccgaggatgtctagtattccgggaccagaccttcacggatctgggattcgaggagcagaagagaattgcctcgtgagtcaatcttaatcaagtcaggaaccctttcttacggtttacagtcactttggccctctccacaagcatggatggatgcctcatcccaaaaatggcccggaggaatttgtcattgtttatgactctaaagagtaagaatctcttttagtttatcatcttttcgcttgatctcacaactcaatagtgacctgcgcattcgcaaatcttgggctagaaaaagcccaatccagttccatgttgatcaggtaagatccacagcgtaaattcaatgattacagggactaaaagatcttttcaaacagtcccccgagactcagcctccgggtgcgacattcttctgcatgctcgagtctcctcccggcgcgggcggagatactatcatttctaacgtgagtctcatctatgaaataaaccaatcccaggaaactaacaaatatttacacagatgacacgcgcatatgaacgcctttcaccctcgttccgcaagcgtctcgagggtctcaaggcagttcacacaaccgcgaaccctatcatgcgcgagattcgcgacaacggccccgattccgtcctccgtcgaccaattactcgaaccatccacccagtcgtaatcatccaccctgtcaccaaaaagaaggcactctttgtcaactcctcctatacccaaagtattgtgggctgggacgaggaagagtcggactacatgctgaagttcttgttcgaccacatcaaccgtggacatgatttctgctgtcgtgtgcgctatgaacctggcacggtggttatttgggatcagagagtcacgcagcattcgcagactctggattatcaggcgggttctcgccgccatgctttccggttgactcctttggctaatgtgccgattccgagtttgattgaggaggatgatggggagtgtgcgaaagatgaaggccggatgatgctgaatctctgctagtttgattaatgtttgtgtacagatcgcgtgccttgttgccttgttagtcagtttacctagctagttagttgtttgtagaaatctactctcctctctctgctttaacaggttatcggccctctatatccttgtctttgtcaattccaccaactttctatcagattcaacaatctgcatactctcaagtggtggctgcatcttgtaggatacaattttgcaggctaggatttcagctcgaaggggtatgctgagacagatattaagttattaactagctagcttcctgtttgttcgtagagaatcaatgcttctcctctctgctcctttaacagttttgattataaattttatacattatgttacattgcccatcaatgtttccaccttgataaatccgagattcgttgggcccttgacacctgccgctccatttgccgaaatacgtgttgcccaacgccatctccgaatccagctttggagctcggcgtattctttttcgaatgaatactttgcaagctcgaacgtggctggaatttcagctcgattggatggtgtgacgatttgtaaaagatgcaccatgaatgaaccagcaatagcaaaattgggtcgactccctacctcattggttagggcaaagacttttgtaagggatatatggtatactcacaactatgccagaacgaattccactgagctcccgtgagcttctcgacaaattcgacaaattccttcacacataataatgctcccttgacaaccgctttagccccttcgtatgtcgcatctggctcttctttgtttcgttggattattgtcggccatcggtccaacggccgtaacaatgcgcgtaggagggcgacgtgggtaacaatgtaggagaggtagagggacccgtttccatcgaggtccccaccggaattcgctgcgttagacgttgatttcaggttacttggcaaattctcacgccaatccttgagcttcacacgcattggtcgtgcaagatccaaggaatattggagatcattagaggtctttccgatcgccttcaccgaatagaatgacctctggatatcccacagaattgttgttaatgttgaaagatgatacatgtgactctttgtgtccggcgagtcagacaaggtatcttgaatgtcttcttgctggagcagggatacatcgtaatcatcatcacctaaatgactgggcattcctcgcgcaagagcgacccatttctccatgatgtagagtccccaccagagtcgacgacgaagccttttctcccagggtggaatggacatccatgactctgggtctcggtgaagcccaatagtctgtgcaactgccagagaagttgacgaaagcgtccatgcaaacgcggtgtcggaaagatacatgttggtaggaagtcgctgttgaaggagaagacaggcttggagagtggcgagggaaggagcgtgaagttcctgcgataagcaaagccaacacagacgatacaattgctcactggatggcgggtttaacagcaatgtgtagagactgtcgtcatacataacgaacggaagggcagtggcgcatattgctgtcaataatgccaaaggcattctaactaactcgcccggcgatgatgggatctggtggctcgacaaaattggaaaacaagggtcaacatatcgagaatataatttgatgagatgccacgctgcagtgggatccatcatagcccatagacgaggccacgcattgtccgtaagctgcggatctagctttggctccgccttctccagaagagaatgatctgtgatcccaaagacagtagggtgtgagagctcgaatggctttccctctttttggtgtgcattatccatgattcgatacttcaagccattcactttcggtaacgacacattctggccatcgtaggcttggtggctcaggatatgaatatcggaaacccccgtcgggccaatatagaagctaaacgcccctggaataaattcaagggaatccacctgagaaggcgaatctcggaacgccggtcgttctcgactaggtggagacatttccgggctggatgagatgctgcctcgagaaccgacccccgccgttccatatcgactgactggtgaatcacttctttgcggacttattgattctgcctgccgagtctcttctggtgtaaagccttcaacgtctttcccatcattcggtcgggtctcggtcaagagatgcagccatccgtcgggttgttcgcatgtctcgaatgtttccagttgctcgtataatctcgcccttttccgcggccccggaccctcctcaaatgtgcattcttgatctctgttggtgcatcggtgacacggcggtccatggggcatgtcgcaggccactttacgctttcgacaagcatcgcaaggccggcatttccgagatttgtacaggcgaccattcaggacaggagcagaaactgagtactccattatgaaagcaatcttagagaatatcagagaggaagaagaacctccggaacgttgagagaaacggagccttatcttcagcacagacgcgtgcttatcatggtcaagcggggacggtttccacactgcacggcagacgacttgggccactgagtattaaaccctcattggaaaatattgccaaacaaaaacttagtcatgtaccctcacataagtaagacatagttatatatatgctgtcaaaaggcggtgataagggcggtcagcggatattcactagtgagagttaagtccctgatggccggtttcgtcagctgtatgtcactaggactttggattgcggagaaattaatgttcttgtggcaagcaagggtcaccggatagcaaattggagaattaggtatcttttgtagggaaactacatgcaaaagatacataaacacaaaatagtcatacccttaatttccataaccctcgaactaattatggagaaggtggaaatacatttatagtgtatgaagtgttaattacttagtattagcatgcttgaagtaagagaatagttgaacctgtacgaagtacactatttatgaggtggtttttaaggtattccttctatattatatagaggcagatcgactggatcaggctttaatttgatctctatctttttaaatgtcatttttttgtgtgttcatgtaccttttgtatggagtttctatacaaaaaaacctaattctccaattcgccattcggtggggcctgccaacacccggtcatccatggatggccctctgggccctaagccgataccgaggcttttgtgatcgtctagtagtaaaacacggtgtcttatctcctcacagcgtggcctccagatccaatagtgcttttagatacggactcgatagaattgtatccgccactttgtcgtccatcggcaatagtggcaaccggggtttatcgccatacccaaattgtcgatgcaacaatttcttcatcccggcaatctgcgatgatgacatgagcataagaatcggaaaaactcccgggtgcttcacttactccgatcttcaatgctactccgtccgcgagagcaatcaggttttgcaactcagttgcctctttgctggacccgctgtcctgacagagatcccacagtttcacgcatgatttctggtcgcttgtcagtcgcttcttatttctttgttgtattattggggcttctcaccggtgctatattaggtaggccgctgatcgcacccgctgattcaaccgagatggatggtagcaagaagtcgataaagccatcgattgcccgaaagggggtagatgatgatcgagggaagtccttttggaaatcgaggctggagacctgggccatgattcgagtcaacttgccaacattagcgcatctgccgggctacgttagcgggaataatttatggaagatgtaaaatggtaaaaacacacgtcagtttcacaccgcagatattggcagatgacttgatgatctgcacaatcaagtcactgtccatatcaataccacccgaaacagcggggaagttgtatatgatactacaaattgttagcaacatttttgtctgaagaccggggtaatacaaacactggcaacggtgatgcctctgcgatatccacgaagaaattcttgatcgaggtggagtctgccaaaagagctccggcatagtatcctggtgggataaccatcacataatctgcgccagcatcggccgcatctttgcagagttgaatagactcgcgagtactagctccgccagcacccgcaacgatcggaacacccgtcaggttgatctcgtcaagggcaacgcgagcggaccggatgagctgcttcttctcttcgtggctctaaagataaatactctgttagcactgtagattttttttgccttaacggaagtctgttaccagatgaattgcttctcccatagacccagatatgactggaatggttccggcacttgcaatgactttcaaactggttagtgaatgttgtagttttgtggagtttcatgactatacatttcacatggctctggaaagctttggaatctggattccgaattagccaagctctcaagccagtctacctgatcagtctaaccaatttcctcatcatcaccgaagaagcacggcaaaggcgtatagattcctgtaggtaaaggccgcatcttgggtgttattgtttgtggcaaagtattaatcgagaagcagatggtcaagtgtaaagttttgttagcactcttctgcggattctcttttgatttgacttcggaatccagccgataaagatacagccaagataggacttccaaggttgggcgagatcttaggcgcggcagagctgcagggcgcgcaaccttatcgatagcgttatctccatgcccacgaggccacgggtgtatgcggggacccgtgggccgtccatggatcaccgtttcttgaagaatcgcctccaaagccggggctgtagggcgtgcagcttatcgttagcgttatctatgtacatacatagatccatagattcctgtagacacatccatgatgcttgtatgcctgtggggatctcgggaccgtcactcgtgcctccacggcctccacggttctcccgaggccctgcaggcggcgcgcattttatcgatagcgttatctatgcggggaccgtcgcccgtggatatgctctccttgtaatctgagacctcatttctgagcatatcttgccgtgatattgcctatcatgtggcatcgcttgccccaagcttttagtaacataggctgctagtgacacgcagaagggctggccgaagcggcaaaagaggatagtgaataatcacatgtttaatcttttttttttctgcccttatctctccactcacacatctttgactatctacacgcccgtttaagctgcctcgggtgaggcgcttcttggccagaatctttcgcttactacaatagtctattcagttccaaggttgtatctatagattcatccacttttctaatagcgtagagatctgcctaaaattctccaattaatcttagtccttagtatgttgtatcgaaagcatattttgtattgtataactccgatatcttctataactatcatgcaacttccaagtttgctgattgatagtgtgcttgttagttaattagaggcagttaataaccatcggggagctctactatatatgaaatcgaattaagacccctcggtggagatgggtaggtcctataggtctaacgtagaaggttgtagtcaacgaaaatgctggcgtcttactcgaggtaatttaaacagttgtgtagatatagtggaaagtagacttgaaggcttttgtatcaatatattgtattcattcgctggtctttgtttccaggatcagtctatgtaactcttgcaatttccgactatgttcatctttcagcgatggtatctcgggaacgttcaacatgaagccgaacaaaaagcaaaatacttgttcccaaatctattatctactccccctaaagtacaaatcggaacaacgggctatcttcgcccatctctcccagctgttcgggagtataggtccgctcaatttcatcaacatccaaaccatcccgtcgcttgttttccttgcgcatcaaaaaccagtgcacagtagcaggaatcatggctccgagtacagtcgcgccaacggagaatccaaatcctagaggatagacaggtgccttcgagatgttagccaaatcctggaattcgaggtttcttcggccaactgacctcgctagagatgtaaatattagatccaatactaccaccgcccacactgccgaacagcatcagaagaccgatggcagcggcccgcttggatggattggtgatgttggagcttgtccatgcgccaacctgttcaaattatcagccaagatcccaatgccgtagttagaaggatagcactgacgattggagcttgcgccgagtatccagccgcagccaagaagattgcaaagtagctcacaccgggaatggaaggatggtgcacggtaatccacaggatgataataccactagatcgttctgtttagctcgagcttccacctttttgaagatcagcttacatcaggccaagagaatatgcgcccatgatacagaagtaccgccgctgctttagatcgctgatgtacccaacagcaacacaaacacacgtggcaaaaatgtaaggaggcgtggtcataacctgggctctcactgcagtatatcccaggtttttgaccatcgtgggcagagtgtaagacagggagtatgtaggcacggagccaccccaccaaaacaacatcatcatgaagtaagttttccggtcttttgcggctgaaagcacatcactccagcggaattcataagtggaagtcaccgggccgttagcatacttgacgcgaagagaagcatattcaagttcctcgtcagtgagccatttggtacctttgccagctcgatattgatgaggaaaggcgctgttcatggtcagttagcttgtttacttaagaaagatattattcggagatctcacggcaagcaaaccagacaagcaaggccggcaaagatggtgatacacccttcaataaggaatagccacctccaagctctccaaccgtgatgtccatccaggtatccgacaccgtaggcaataacaccgccaaaggcaccggcggttgtattcgcaccgtagaaaatagccatgcgcgtaccgatctccttgggcgtgtaccacatggatagaatgaaataagctcctggataaagtccagcctcggtgattcctagcatgagacgaataacgataaagctgccataggagtgcgcttgtgaggtgagagttgtgatgagtccccatgcacatacaatgaatgggaaccatatcttaggacctactcttcgaagcatgatgtttgataccggttcgaagaggccataggtgaagaagaagtacatcaaggctagattgtactgtgtaccattcatgccgatgtcctcaaggagaccgaacagctaatcgcgagagtaattagacttaaatatgtcatggacattgaaggtaatgcatacctttgcattgcccgcattggacttgtcgagtgagcacatcaggtatagaaaactcagtgttggaagtaggcgtgcatccactgaagtcaagcaagtgagcgtctggactgtttcatcatttcaaaaagtcttacacttcctgatgagcttcttctttgcgggtccgttgaacacattgtccaggtgaagaaagcgctcgtattccagcgccgaatttccatctgtcacagtcacgacctcgcccttccgctctgtatcggtcagggaagatggcggcgaaaagtcggtcgatttctccatggtgagatgtcagagtgttgttttcgccccaatgtttgaaaaaaatatcctgatgaagagcggtcttaaaaggtattttggcatttgctggtttatctctgtctagagcttggtatctctcggattgcgagtagttggctggatttggtagcacaaagatcgcggggttcatcctatcagagctataccatttgaagcacactgtcgctatagcaaagcgaataagatttccaattgataggcctgtcgttggcctctccttggcctctccttggccgcgctgggacgataccgctgataagggcgccgtgcagctttatcgcacctcggaagcttcgccgagcggccaaccgtatcagcgtgataattagatgttggaaggcgaaatagatgcatgtaagttttttttttcaacagcaactgagggcagctatatagacccaactaagctgagctgtcaaaacaagtcgcgtaccgattgtttaaagtcaacaaagtcaacaagcacaatgtctagcaccaccgttctcacaccgggaacgatcactcgagagaagaacgaaaatggcgaccctctgtatcctgactacatgcgtaagtctatatgataacaatattgaataagcccgtggatgagtgctaaactctatttctttcacagcattctatgatcctctcgagaaggtagaagacatcggttctttcgagcactttgatcctggccatcgtgccgatcccaagtttcccaatcttctgaaaaatgccaccaagatttgggagctttcgccgcatgtgggaactgaaatccacggagtccaactctctcaacttgacagtgctggcttggatgagctagctctcctcgctgcgcagaggggtgccttggtattccgcgatcaggatttcgtgaatattggcttcgaggcgcaaaagaagattgtgagccattttggtcctctgcatattcatggctgggcgcctcatcctgctgcgggatcagaggagcatatgattatctatgaccacaaagagtaaatataacctctcagtgtgaaatgaagttcactacagctgacactacagccagtgatctccgagtccgtcaatcctgggctggtcgaagcccagtccaatggcacacagaccagagtcctgagcaacagccccctggaaccactttcattgcgatgctcgagtcaccaaccactgcgggaggagacacgctcgtgagctctagtgtgagagcatacagcagtctctcgcctcgtttccgaaagcgccttgaaggccttgttgccgttcacaccaacaacgatggtgtcactcaagaaatgaagcatggccagcaagctgttatgcggcgcggcgtcctccgagctgaacaccccgttgtgctggttcatccggtgacgaagcagaaggctctttgtaagttttatccagaatttcgctctacgcgatcatgttatccctaataatgagtgccgctagatgtcaacccggtctacacgaagaaaatcgtcggatttgaccaggaagagtccgactgtattctcaaattccttttcgaccatatcgccaagcgacaagacttctcttgtcgaatccgctatgaagctggcacagttcttgtatgggatcagcgagtcaccaatcactcgcagacactcgactaccccgttggagaccgcagacatggattccgattgactcctctcgcgaacaaaccaattccagcaaaggttgaagaggatgatggagaatgttcaaaagatgaggctcgggtgcaattaagtctgtgttgattacagtattcaattctgcataattttggcaatctaaaagagataggctgggctgtacataggatctgcgcacagaactaaagaatctcagtctattccaaagcggggggggactgtatatacatcggcaatgccatcaaggtcggacgtgtctttctcttatcaattacaacgtcataattggagtatttcacctataatgatatcacaacataggcactgctaactatattttccctatatttactaattatcctaagatgagcaataactaaactctcatgagtacggagtaaatcagattctttgtactttctgtttttcgagaaatttttggtagaacttatttttcttctccaatgcccgtgccttttaaaccatctgggcactgaacgagtatagggaatgaaatctcatctgatagggacgaagatatgcaagctctgacacctttcttctgccggatgaaatggaggcggtggagccggggatgatcagcacacgtcaaattctttagtgtaaaaactaggtacctctagtgacataaaagtacatactgaaacatcgtagaccaaagtactgataagtatccagtcaccgctagggtacctactccaaacggcgggccacgtgtttcagcgtcacgcaagagcgaccaatgaacgcgaccagaacacccacgtccacaacgtccacaacgtccacaagcgctaacccaaatcctttggagttaggtcgatatttaaaaatggattgatgtccccccttcctcgcattctatatccttgcaggtttcacgtacttgcctggttatgatatcatctactcatactcagctaatgtgatggcagtgttctctgaataccatgaggaggagggcctgcttggagagaggcaatatcaagcctggaagcagggaggccggcagcgctcccgaaaatttactgcattgatcctcatgttcctgctgggcacttttgctctcgttgtatacttcgtgaatggaacccattgcaaccccccttcacgtgctacaggccagcgcgacctacctctggcctctccccttgacaagttgaagagatctgcctgcaatgctgtcgatggcggttatcaatacaactccgagctttcccacaagtggggccagtattccccctatttttctctttcggacgaatcggccatctcagacgaggtaccccatggttgtcaaattacctttgctcaagtgatctcccgtcatggtgctcgatttccatcggcgaaaaagagcaaggtatatgccgagctcattgaaaacatccaagcgaacgcgactgcctacaagggcaacacggcattcctccgctcgtacaaatacgtcatgggcgctgatgatttggtaccctttggagtgaagcagatggtgaaatcgggagccaggttctacgagcgctacgcgacgctggctaaggaagctgtgcccttcattcgcgcatctgactcggagcgggttgtggcttcaggagtgagctttatcaagggcttccagaaggcaaagtctcatgacaaaaatgccaaccaccggcaattaagcccgaagactaatgtcataatctcagaagagcctgggactaacaacactctgaaccacagcgaaatctgtcctacgttcgaagacactaaactgggggacgaggtcacagaaaaatacatggcaatctttgtgcctcccatccgagcccgactcgaggctgatctccctggcattaaactcgaaaacatcgatgtggtcagtctgatggacgtttgtcctttcgagacagtgtcccagagtgacgatggagccaagctatctccattctgcgacctattcacccaagctgaatggaaccattacgactacctccagtcactaagcaagtactacggttttggcgcaggcaatccgctaggcccaactcaaggcgtcggtttcgtaaatgagctcatcgctagactcactcgcaccccagtggtggaccaaacaagcacaaaccatacgctcgacgcccccggtgctgcaacattccccctcaactacaccatgtacgcagacttcacgcatgacaacggaatgattccgttcttctttgccttgggactgtacaacggtactgctccactttctctcactcacctccagtcccctgaccaaacggacggattttcatccgcctggacggtgcctttcggtgcccgcgcttatatcgagatgatgcaatgtcaggacccggagcccctcgtgcgagtcctcgttaatgaccgtgttgttccgctgcatggctgcccggtggataaccttggccgttgccgccgtggtgatttcgtgaatgggcttacctttgcacaatacgggggtgaatggtcccagtgctatgaataaaggactctgaaaataattggtgcggcgttggttctcctttaacatgtgtttaacgataccctaagagtagcatccttactacatatccttattttggccagtgttaatgccatacacgttaccacgagatctgtgtcttggaaacaataagattgtacccaaatatataattgaggctctaacgcatgcaattcgtcaagaaagtgattcaaacagccctccaaccccaagaagcatcccaaatagtaaccagtacgttttaagcatctctgcatctctccttacctaccccaatgtgtccgaccattcccgctaacttcatgcggagcagaaagaacccaagcttcccacagaggcaactgctcacacaagacatgtacaccgtcatcccctagatccccactagacaaagaacgcagtctctcaattgaagtcctcaacggcaacgccctctccctcaccaaagcagagaggccatcacgcggcagcggggtagtaattggcgactgaggatccgaccaggtgccagccgcaaaaccaagagaagacggcataggaccaacatggtaatcatgaacctcgacaccgtttgagacaggaactgaatcaaagtgtgcggcgtaatcaatatccttcagaaccagccgctccagccgctccatttcctcgcgcaggacagctagcacatcgcgccacaagccaccaggccggaggtaaatgccgaggaggcggaaatcgcgtagctgcgacctatggcgacgtgccagtgcgatgatctcgtctgcgctcaggcgccagccttggatgctgagtttgcggagggttttccagcggatatggtggaagagtagctcgaggtcgagatctagtggtgccttgctgagaaagccgatatgaatggcgattaggttcttggctgcgacgaagaagcggtggaagacacctgagaggtcggccatggttgcggtgatgtcggttgtcgagtggaaggttatatcgaggcttgtgaggcgtccggccatggcggcgaggattgttgacggggcgcggaggagctggagggttgcctccgggctgatctggggccctgtgaagcggatggagctgcattttgagtcgaggagggcaatgctgaggtttgtgactgcgcgcgagcaggcggtttcccagtcgaagcggatatctgttgcagtgccggtgccagttcctagtgagcggtcgcgtatgaagtcgatgaggtattcgtccgcttcatcttgaagccttaggagctttatttcctgtaaggctgagaacgccgcaattgcacggcggaggcgggctaggtccttgttggtttcagtcaggttggtttgttcacgcagccggcggctgtgtaattgggatatttcgggattctctgaccccaaagcctgtagtgtctggacccattctgtattctgctcttagtcaatttgctcgcttgtggttgagagattgaagagctgataccgcttccttgataaaagggccgcaccatgtacgtgatggtcttcacatagtaggccagctgcatatctaccagctcatctaatcgccggaagccgtgatcagagaaacgtagagtaaatcgattgaacttgtaaggggtgccgattcgcatgaagcgcttgcagacgagtcgaaagtgatcaagatcggacacttcgttatattcatggtcactagacccgggagtatgtccatttccatgagatctgctgcttagggctcgaggtccgggttcgagaagaaaggacaagatctcgctcattagctcgtcagcgagatcatagatgtgacatggagtcatgatcggcgcgtgcagccgaagcatcgcctgcttgtttaagtggcagcaacatggaaagatggaggaattgagggaaagtcggcgcttcttaagctatccccaagaccgaagaggcgagtcacggagggaattgggaagaggaggggaaacgacaaataaaaataaaaacaaaacacatagctaatactcgactcgtcgctgttctcctgcagacactagtaggatagttgacttatctcaccgtgcatggcgagagctctcgccctaacgattgatttcgcgaccggggacgatcatcaagggcctggtttagcgccctctgcactgacaagccgggctttctgacccgatccgcttgatttcattggtgacgctgccacacaggaatcacatgattgattgactctgcggccagccagcgaacctgcaggaaaggcttttcaccaagagcgcgtagtgtcggggagggggccaatgtagaccccgccgggaagtcatcacatcatgcagggtgatgggccatgcgtgcgaattatgtgtctaccaagaatgattggaggttaatggccgaaatcacgatgaactaatgtgtgttcatgtgtccaggagattatctactagcgaccgaatcttccgtataattacgtgccgtgtgtatgcacctatcagaccttcgcaagatgggctcggcgccgtctgatatccgtgctgctgattttggactcgaagccctcgccatcagtggccgtggttgcctctccagactggagtacgtccacctcgaacacgtcaaggcttttccatcccttcttcacccgctcttcgttgacggctgcccctcccgagtgtgtctcctttgagacaacaattgccccaaggttctcctcggtaatcgtgggtccaaatggatcagagatttccacaaattcaaacgctaggttgggttggatccttacgaggacagtcttgccattgggacctggcgcaaaagcacgttcaatctgcggtgatttcttttcgggtgagaaatccataatggccgtcaggaaagctgcagtactctgccaacgctcctcccaactctcgagaaattcggcatactttttatttaccagcagtgcatccccggtcaccccgatggtcaagcggcccttctgcccccggtggagcggttccagggccaatgcaactgctgtgaggagaagcttgtgaccaacatgaaggtgatcaaatgtgccaccaacgaccacggaatagtgtggagtggatggatgttggttgtcaggaattaacaaagggtcagagatcgcccagtcaggcttgcttgtgatggcttgcatgcttgccgccgtgatctcccgatcctggctgccaacactgttggtgaaggaattagccaaagtttggccgacagtgttgggtagatagaaaacatagttccaacggcgcctcgaatttgctagtgattggacgtccagaatgggcccaaagcgagagctatcggcctggatggccgaggtgttctcgcttgcatcgacaaataccacccgggtatcaatgccacctggagagtccaattcaattttgtgtgctgcacagacagcaccaaccagcgtatagacgctgctcaagtaatgttggagttgggcaaacactttggcccgaggttggcagctcggggaaagaagatctggaatggccagagcaatatcgagcacagctgtacgattggatccaatcaatgcatttgagagtttagtgtagacctccactaaagacggctggaaggcatctttgacttcggcaaaagaaaaagctggaggcgggggaagtagtagtaaagccgagggtgaattggtatggtcggaagccatggtgtgaagaatatatgactacagcaacgagcactggggttaacattcaaatccaagaaatggaaaatcaacaagaagcgagaaatcaaagaaatcacagaaccaaaaagaaccacagccctcaataagtgatccccatcacaggctccaggagggctggggtaccggctgagtcagctgttctcgtgggatggatgacaccgccctctgtcctcctacaactctccgatcgagatgaggatgccattgagagccaagtgacctgacaagctggaatgatatctggctgacacggtcgtctggttggagctccctcgaagccccgctatatcaccgatttggtgcatcccctaacctccttcactgatctcgatcgagaaacagtggagctcatcctccaactacgatccacaccatcccctgcatagacagcgctcttgctcttcagcatagaccgcatcatgtcaaatcccgcttcctacgacgcccaccggcggtcagctgtgttcagtcgccagccggaggagcttcacattccgtcaaccgggccaatcaatccaaactcgtcccgccaatcctcctcgcacgactatcccgccacgtcggacgcgggtgcccggcttccctcaattaacgtacaacagagctcccaatacggcggcgacgggaatatcagcagcagtgccctccccggagccttgcaaccagggaatcagaaccgcccggctgtagtatcaataaataccgctccatcggtcgtccctaccatgcagcagtcatcgtcgcaaaccaaccaccgagcgagcatgattaattcacacggacattcacgatctagcccggccggattcgaccaatccatgtataagcaacacactgcgcccgatggctcgaagtatccctcttcacctggggcatttccccctcacactcctcaaggctcgaagtactctccccttggtctggccgatatcaggccatccggtgaacacatgttgagcgaggcacttatgaaccccgggatgtcatcaatgtcttacaataacggagacaatcaggtgccaaccaacagcaattatgtggcaccatggcctatatacgcagtggattggtgcaaatggcccatcacgggcaattcaggctttggtggaaagctagccatgggaagctatttagaggacagtcacaactatgtatgtgcattcaccctatacatgaatatgttcgcgctaaacagttaacagattcaaatcctcgatacacactggacgcagccagatcccgacaccccagatgcggctgccggagagataaaactggattatgtgaaaacggccgaggcgacacattcttacccggttacccgcatcctctgggagccaccctcatctcagaagcaatcgactgatttgctggccacgtcaggagaccatcttcgcttatggtcactaccgaattcccagcctctccaaagctcgaactcgatcactcgtaccgcgaaccagcgagaccctgccacctccaagctttccccgctggctttgctgtctaactctaaatcccccgagcacactgctcccatcacctctcttgactggaatacaatttctccaagtctgatcattacgtcgagtattgacacaacctgcaccatttgggatattcccacattgacagcgaagacgcaactgattgctcacgacaaggaggtgtatgacgttcgcttctgcgccaacagcgtcgatgtttttgtaagctgtggtgctgatggcagtgtgcgaatgtttgatctgcggagccttgagcatagcacaatcatttacgagccgacggataagagcgagaagcgtaagtagtcttccaggttataattacgtgctctgaatattgacaatatcttcagcagtgatgagccccgggagctccagcccccctggccaatcgcagaccggcctctaccctccacctttgttgagaatcgcaggtatggacgacatgaccgcaacatggcatataatcacaagctaacacaatcccccagcatctccccatgatgcccatctcctggcgacattctcacaggactccagtgttgtccgtgttctcgatgtccgacaaccaggccaagccctattggaactgaagggccattcagctgccttgaactgcgtagagtggtctccaagccgtcgcggtatcctcgcatcaggtggcgacgatagcatggttctcctctgggacctcatcaatcaacacaatgctgcaccgatcgcctcccctccctccgtcaccccaggagcgccgccttccacaacctcggagcgcggccccgctggcgtctggcagagcgaatacgaagtgtccaacatcagctggtccccacaaggcgggcccaaccacaccggccagccacgggaatggctaggagtgtgcggcggacgaggactaacaggagtcgcgttatgagctatcatcaaaagaggtcttgatttccatatgtcgtctgttttcatccttggcgctttccgacaactatggctcttgcattagatggttcgatctctctgatatttgtttctgtttgccgcgatctattacctcgcgtgcgcacagcatcccctgttttgcttcgttctgtttgtgtgcttctctagtaccggtcggcttctctgtctgacccggtacgttttttgcataggtcgagtgagaacctggtgatcttcatgggctactcttggtctattgattggccatacttctgacttgcttggtacgagtgaatgaatgaatgaactatacattggatatgggccatttgctattggttgagaacggccttgggacacccattctacgtaaatcgttgtaatcatattaccccaagcttatagccctggtgggacaactaagatttatcatagtggtcaattccgctgtgaggatttgactgttcgaataaaaagcgcgtatagcttggggctctgtgaattcttcatttcactgcgtgtatgaacatctactttcatttccagttgaaacagtagcatggcgtgacgtgagtcttagttctgtcacgagtctaagtaacaggaggtggatcgaccaacggtcccatgcagtaaaaataaccaagacagctcgcccagcgagcaggtatcatatgcactacaagtgtacccagacagagaaagcaaccactaaacaatgacagtctaatatgaacaggtttatgctaagcagtctcactctgcgtgggtagccagggttgggcgaccgagcgttggacccttggaaatgagacgatcttcgagtgagcgcgcaaatttgacgctagggatgtccacggcacgccagaacacatcgcctagccagatggagacggggagacagatcagccagccaatgaggaagccgaggcagtattggaagttggtctctttgccagtaatattccagatgttgggcatgatggagtagcctagacaatggaggacggggccgtggacgacgtagaaggcaaatgagatatttcctaggtattgggagaagggattggtgaatagtttctggatgtcaggggagtggttgatagagaagacgatgagaacggctccgatggtctgagcgaagcggtgcggctctggataagtcttgggggtgacgtgccacagccagccgtagaaaggcgtccatttgaaaccaatgttgggacatgagccgaaatagagaccgacgacaaagagcgagatccataggccgcggcgagagaccctgatggcgattttgctaccgggactgaagcgaatagttgttttgtcgtcttctaccgccagccgtgcggatggctcccaggtcccgttgataagatccacttcggccatcagcatgccgaagagaaataaaacgagttcccaacgaccataacgcatgcagaaccaagtcaaaccagagactactgtcatgcgcacaggtgctaccaagcgtgatgtccccatgatgacgacaaataggataagcgaggagcggaattcgagaggaatcgtccaaaggtgcggattgtagtagttgtagtaaagcgcatagtcaaatgggttcatcaaggtcgccaatgtgacccacaagtcatcgctttgtttcgagaaggatttatacacacgtggatgttgctcgttagtgccgaggattgtgtgtccttccttgatgaccttatgggagtaattatacagcccgaggcgaaccgccacaaagacgcaaagaattccagcaattgcggggatatatagacgaaatgctcggcggaaggttcctgatgcgagcacggtgaaagtttgatcgaaggacctgctccgaatggttttcagcggcttgtatgataaaacgtagccagagaggacaaagaagatggccaccatgatgtgaccagagatcagcatatggaaaaacggcaactggtgcatcccaaagttttccccgccaaatccccatcctatcgcgaccttccatgtgtatgtgaaaaggaaatggaagttgaagaccagcagacacgcccagccacgcagcccgtctagagctgcgatggagtggagcttcgcaggctggggtggcgagctgcctgagccgtccacccagtgttgtaggaaacttggcgtgagcgcaagtgtcaacctgtgccatgcgtcttcagaatatgccagccagtcttcttgcgacacctcgggatgcgcaaggatgttcgaggggtgaaactgtgacaagccattcccgcggggtgtgatcgtggagtcaggttccgaggaggcagattcgagatctttcaaagggatgtcggaggccgaagtcgtggcccgattttcgaggtaggatgccatattgttatgttttgcaggtcggtcggtcgcaactgggcattgccggtggggccaaaccctcaatacacacgccaaaaggcaaatgaaagcatttaggccggtatagggtattggggaattcggcaaaggggaattgggcagttcgcgcgtccagccagatgcgataaagccggtgatgcgggctgaggtcggcgaattcaggcaaatacgtcagcggaaggcctgctggttcaccgccactgaaaattgcgaaatatgagggagatggaattcaaggatagtctaagggagttgaagagttgaagagtcaaagtcaaagagtcaaggagatcaaagtaaagacaaggcagagaggcgccgatcgattgccgttttcgttaagccgcgttcagaacgagtttcgatataaaagcacttggtacggagtattcatatgagtgatcatatgagtgaggctatagttcgagatcaaattgcatgtgaattttgatctgcatatatgtctatggatatatcccggagacgtctgacgcgtcagtatcatgcagcagggtagtcaatagtcctacatatcctacttctcttcgttgaattgctgacggttcctatgtgacttcctaaattaatagtaaatagattatcaaatttttagtattcgagtccgcagaaaagtaactagaccgtttactcgtcaacatcaacatcatctgaatagccaacagggaactaatatcgacaattcaatatagaattagcaccccggaactaacgtccgatctaaaattcttagatatggcatgcactgagcctgtaccatcattaccaagctcagaagcagaagcagaatcagtatcagtatcagaatcgtcaaaaggtttgggctcgtctcctccttctccagtctccagcgaacttgggcagcttcttgatatcatacaccataacgagccaaatctcccgtagatcctcacgaacagaaatcatggtcttctattagcgatctgtcctccaaaggggccttgtaccatttgttaaggttgacatccatggatagtgtatagttcccaaaacagcttagcgtctgcttaactgcctcaggtgtctacgccaagacatcttgagatcacaaccgtggcctttttaccgtcagaggagactcaagaggttgaaagatatatatcacgtcaaagactgttagacacttgtatgaattatgtgattatcaaaggagaatggacattttccatgattcgctcgaccaagttctccgaatgcatcatatacttcccaggagctccgttttccacgggagcttcgctgaacattttcgagctcccaagcttccaacgtagaacttagacatctctgtgatcgatacaaattggcgcacagcatagaccattggaccttgatgtcgcaggttccctaaagcggcgacgatcctctcagctccctgattcgcgcgattccgcaattcaagaacttctcccttcctctttgtccatccacgcttattgtcccgccgccttctttctgcttcccgacatcttgcaatacaatctgaatgtcgcgatcgtctgtcgcgtgcatttcttgatcaaagtgctcgcgtggtcgaagtggtcccgaagtgggtgcagtcacgatggatttgcgcacgatcatgaacaccgacggcggcgcctccaatcctccacccccaagcaactcggccagttctcccatatccgatcaaaccccccaaaagcgcccgaggaaggctgcttcttactcagaatattctacacgtccgccccagcctcctccgttgcaacacccgcagcacgcttccccagagcgaagctcaccttacgcatccgttcaatcgccataccaacaattcagctcggcccctgtgattaatacagcggtgaggtctcagcggagtcagacacctccacacgtttcgacaccgtatggtcccggcacgcgtgatccatttggcgcgccggcatactggtcgcagccccaacaccccggtggtggtcctctggtttcgccatacacaccacagccgatgagtgcgggaccacaacacccagaacaaccgtcttattttgcccagcagcgttctcaacagcgttctcaatcactccaatcggtgatgacaacaccccgagctccaatcgaatctttccgcagccctcctgttgcatctcaacctcttccatcgcagcacttctctcccgccgcacaccgatctgttaccggcacccccttgggtcctcctgctgcctttgctgcccgtcaatctccgtcaactgcccgcccgccgtcctccggccacaattcccccggcaatcccctatccagcccgaggcccacacgggaggccccgatacgagatcaagttccaacgcaatcacctgtgactcagcgacagttctctccacacagttctcaaccgcccgagccgactcgcctcccttcaggcggctcaaagcaagagccaaccgagagcgccagtccccaatccatatcccgtcacaatagcatcgtcacggcctcggagtcagcgaccgctggtcaagttcgttcttccgaagaccgaatgctggttgagagtcctactgcacaaaagtccaccgtggcaggatcagatttcctaacctccccattggcaccgggcagtcaaatgaacagttcaccctccgctcacggaggcgcccatgccgtggacatggaaatcgaccacgaaccacgcgtcgatatacaacagcccaaacaaaaaagaaggaggtacaacgagcctccgatctatgctcggctgactccccgcaacacaaacagacgcccgattattcccaatccccgtcccccaattccgaaacatgcgcgaaaaagccagcaggatccctccgtagctgttcgcagacggtcttcctcgacaaaggctgtcacacccgccgcgcgggtcacacgagcacttcctattgcttcaccaaacacaagtgtgcctcgcgtccaagcttccccagctccgcccgctccctcacttcgtccgccgaattcgcaggtggtaggctcgctgggcccttgggagccgtccattactggcttcattccacacgaggagattacaaaaaccctttgtgatttcttgtttcaacatgtggtcatgagaaatgatgtcaataccggcccagtaggctctgttgcggctgccagtcaaggaactatcatcgaaattgaggcgaaattgggccatattatcgacttagacagcagagagcggattcacctgccaattttaaccgagagtgtcctcaatcgagagaatgcacgaattcggacatcctttgagagcaacatgactgtggtaagttgataattcgatgtcctatagcgaggatgcctcgacctcgatgaagtttacttaccatgatccacaggaacaacacagagctatgaataattttctgaatgaggctgtgaaagcttcaatgccccagcctaactcgacacgaatcccacttgcatacgtgcacaagaaagaacgtgacacattctatgagattcaagcagccgatttgcccccggtgatccgtcaaaatttgaacccgaggcacaaacccaaagtccgggtgacaaccgatgaacgaacaggtgaaattctcgcaaaaatcgtcaaatgtcgagttgccgacatggacgtctgcagtccgcggacgactgtggactggcgcgtcagtgtcaatctggaaatggaatacacaggcgatgtcagcaatctcccagtgatagatgcagcggtcgtgaaaggcgcacgaggggatcgcatcaaggatcgcatgagctaccgtcacttggcgtaccaggtggacttgactcaggtagccaaatccgatgtaagtttatccaactgttctgtgtcaccctcaaagcagtctgctgaccatattacagcaacaaccgggcaagaatgagttcgagcacgagcttgaagttgaggtctcggctgatgagattcgtcgtcagggcaagcttgctatgtcgggcgatcccaagaaccagtacgaggatcttgtcaagggctttgtggataatattcgtctgctggctcgagcggtgccgccataatggtctttaccgctttgtactatgtatttttttctgattcaggctttactggggtttagtttgtggttcactgcagatatggtttttcgttttatggtaaaaagtacgcattgcaatagacatcatgcatgggttctatgttgtttctagagcgacatcgttacctagacaagggaatgtcccaatccatcatttggttcgcctcggtttgacaaaatatatcctgtgtagatgttctataaaagaaactaatacccatcccatagtacttgacgaccgattcgagaaccttgaagacagcatcactgtatatatgctccacatatggtaccgatgaatcttttagatactcaaaggtaccgtctacaactaaggtagtatcctcagtctgcgggtcgccaacattgaagcccatcggcccaataactagacgtatttcacaagcgacccgccaccacaagcgaccatctccagaacacatagtaattgtgataaattacaacctgatatctcaacaacggtggtctataagaggtttttcttatagctcaatactgacacacttgatttatgtaaggacttcaaatataaaggtaaatacctaggaagctttttgatcactgccaaacgagtaaaattactcaactaactagttagatacctgactatttcgtaagctaatcgctcggaataaggaataatagcaaacaggtaggtgactctatatactctgtacatgagtcactaagacatatgaaaaaaatatgaaaatgaatggatgtaggctttcagccatgcagctcacgaataaaaatatccaaaagttgaaaatcaccaagccggcagacgggaagtccatttctgcaagaattgaatgcgcttgctattcatggtcaggggacccattccccacgaatcgcccagccacatggtcttcgcagaggtcttggtgcttggcttaaactgcggcaacccatttccattagggtttccagtgcggatgaagttcgcccagtagttggccatcttgttctcgacagcatagtcctcgctgttccatgtaacattggagtacgaagcgtagggaatgttattgaaggtgtaccagagctcggagccgtggtaagcaccctcatcgtggttttcggcaggagcgtgagtgaagtagtaagtatacacgttactcttggcgccgcctgcagcccagtcggcggcccaacgccaggtgccgacgcggctgagatcacggtagaactctttagcgctttgcgacgcctgggagctattctcgccgggatacaaggcgaagaaatcgtctgaaaggtcgccaaagaggttgctgtagagatcgtggtagtcggaagacgtgtaagacaggtctgggctggctccggactcgtccttgttgcttccagtaaggatgggaatatcggcgtgagaattattgcgcaacgctcccgagtagttatccgtgaagacgtatccgtcgatattgggccgccacatagggggttccatgaatgtggcagagaggttagcgaaaggagtgccttcccaaatggtatcggagagcgagtcatattcaaggagagcctccatagacacattccgcaactgggcaatggatgtcacattcatttgcttgaggaacgcgactccctgctcttcagcggctttcttggtccgatagctagtggcaacagttccagtcatgggatcgtgtgttcctcgcgcaccactctctgatatgataccttcggcgaggccctcagctagcgggctccacatagcatcgagggcactagcagagccagcggattgcccgccgacggtaatttgattagggtcaccgccgaagagttgaatgttctcgttgacccagtgcagagctgcttgttgatccagaatgccatagttgccagaactgttgtggcctgattcagcagtaagttcggggtgggcgaggtatccaaatggccccaaacggtaatttaaggtcacaacgatgatgtccttttgtgccaggccagtgccatcgtatgtcttgacatcaccggaaccaccggtgaatcggcctccataaatccagaaaagcaccggcagcttcttggcggacatattggtctggttcttgtaggccggagtccaaacattgaggtaaagacagtcctcactggttgtggtcttgccactggagaagatgccagcatcgctgattgtttgcgcgcattgtggtccgaattcggtcgcattcagcgtgccccatttcgatggaccggcaacctttgtccaacggtttgcacctgtaggaggctgtgcataaggaatgcccttgtaaacgaaggctttgtcgcctccgcggaagggtgagagaccgccatggattgtaccgtagtgggtgtcgataaccggggggcttagggcagaggcgatggacgagccgcaggctgccacagtagcgagtgtggaaagcagcttcatggtaggtataaaagaaagaatgaatgaatgagataaagtgtcagacaaaaactaaagactgaagagaaagattgtgagctcgattgctacataggtaatgttacctttcctaatatattgagacatggaaatactcctaggagatgatgatacgcggccgctgagcaacgatctgccctccatgtttcctcatccgaaaaggacactgatgattatgtacagtttgggtataatctgcatctttagtgagcactcgtttcaaactttggtaggagactcggatataaatgtggagtcgcagatctccgtcggggctgcgttcttattcggggagatcgtaaaactccggcaggtacccgcatgtggagcacatcctttcctatccaggattagcctatttcccaattgaaaattactgaaaattactgaaaatgtattttttttgcatttgctctccttctatatctaccaatatgaactacagtcattatatatgtacatacatgtggctagttactatgggtagactttccacatgttgtcggagtatatcgccacacttgtaagactgttgtaaagatgctaacactgggctaatgctgtccttgcatcggaagtctcaatgtgtcttcaagactgcttaatgccccttactgttcatagtgggctaagtttctttgtattgtgacctaggttatagctgcattctatatttagaatgaaatccattttggctcaggctgttgagtggaattgtgctcggccgaacaggtatcataaaagaacaaaattacggtgatggttacttaatttggtcaatatcttttttaaaaattatcttcattcgggaggaaactgcaatccctatccccaaaggcttatatcagagcctaatctaacctctgttccatcttaaataacaccagccgcaagacagagtcttgccaatggcgatagaatgtgttgaccataagtacttacaaggaacctatataacaaaattctgtctcacatggcagaacgctagaatcaagagtgaaagttgcccagtttagtactcgtgcaaagtggacatccagcgacggaggaaggcgatgcgtttcttcgacgcggcgattggaaccgcaccaaaggagtcgccgagttgcatagcagagtagttgctggaagacgcagggaagtgaactaaaccatctccgttggggttacccgtgcggataaagttggcccagtactcggatataaccgattcaatcttgtaatcggtggcattccaagtgacattggagtagtcggagtaaggaatgttgttgaaagcgtaccagagctcagcaccgtggtatgcgccacccgagccctctgcaggagacgaggtgaagtagtacacgaagacatccttctttgcacctccggcagcccattcggcggcccattcccaagttccaacacgggccatatcgagcagtacagcatcgctattagcgctggcctgggtgtcggtcttggcagggtagagagagaagaactcggcggagtagttaccgaacacctttgtccacaaagtcttgtaagtggaaacggtagaggcacctccatcattctcgttcttgttgttaccagtcatgatgggcacatcggcgtgggcgttcagctccaaagattcgccgtatccgtgacggagcacgtagccgtcaataacgggacgccagcggggaggtccggacaagaggtcagagaaggcagtgccctcaaagtagtcgtcttccatcaattggccctctccgataaggtcagccatagggagcttgcgaagctcggcaatcgacgagacgttcatggtcttcaggaaagtgacaccaaaggcctcagcaacggctttggtgttgtagctggtagcaacaccaccagtggcagggtcatgaggtccacgagcaccactttcggaaataacaccgtgaatcaaaccgcgactgagaggactccacatcatgtccaatgcactagcagatcctgcagattggccgccaacggtgacttggctggcgtttccaccaaagtgggcaatgttgtcttgaacccagcggagagcaaactgctggtccaaaataccgtaatttccagagctattgtgtccagactcagtcgataggtcggggtgagcaaggaagccaaaggcaccgaggcggtagttcaaagtaacaacaatgatatctttggacgcaagaccggttccatcataggtgatgacatctccggagcctccctcgaaacggccgccgaagatccaaacgtagacagggaggtttttgttcttaatctcagtagcggaggtggtgttgtaggtaggggtccagatgttcagggtcaaacagtcctcactggttgaattcttcccagaagagaaaataccagcgtcggagtatggctgggcacactgaggaccgaactcagttgcgttgagtgtctcggtccatgagtcgggcttggtgggaggagtccaacgcttcgacccggtgggaggtgcggcataaggaatgcccttgtagacagttacgccgtcccggaaaggcgatgctgcacccttgaccggtccatagttactttggatgacggggaaaacggccgccgcggcgaaggccggggtggcaaggagaatagaaaggaaggtcaacattggaaccttgaagatgttctcgattgactgttatgcgaggtacagattaactgaggggtgatcagcaagaccttatatatagtccatggatatcgatcgagccctactcaaaatagtttcatgtagaatcgataattacgcggactctaggctaagcccatgtggagctcatattggagaatgcttgcctggagatggaactgcccctgagtatgactggtacttaccgatatccacactgtaggagagaccaatggctgtctgtcgggcttcgacatgcgccgcgcggcatccctgaagaaacatgtttatttgacgcgacggttgatctgcagtggctgtactccaccgatacaaaagaaaaacaaattggttctgaaaatgacgaagccggcaagaaagtgtctccgaatatgccgaatgtccgagacaccctagtcccaatatggaagtccacaccgaagtaaatatcttcttcggcttctttggccagctaatacgatacctcgatgtttcacgtcattatttggtttcgcagaagtgtcattccattttgcatgaagcagatccggaaaattatgcttccagaatatttctcgcctatcatcattgattgagatcgacaaaagtctggagaaattgatacgatttatatgaatataataaatcccccacagttatatgtcaatctgactgaaatccttgggttaattgcttagtgggatcatcggtataggtgcctgaaagaggacataaaggagcagagactgaatccacttccgtcttacgatatggaagatctacagcgttgaatttcccagctacaccatcatccaatgcttgaatagactctccagtttgatcagtggcaccaacccgttcaaccacttcggcaactcgaaacccgaaggtgtcgtatgacctaacgctttcctcctaggcatatacaaaatagaacgggttgttgtgaacttgtttcgatatctatttaatcgctcccacgcccagtcctcgtgattgtagtgaaggatgcatagcaacaacctcacggcaacataacttttgtcggcagtagcctgcctccgataacttcaaactggcttcatgtctgccgagcatttcaaaatgttaagaggaccgcgccaacagaacaaaagatagcgcttcgtaccttgttaccatgtgctagtgtaagtccaaccatcacaacttgcaaacaaaccatattcgcgatatggcccagagagttaataagcgacagcctggttaactaaatagagtgttcctgcttctggtattctatggtagcctgtatatggctctggcgcgtagccctaattggttctgggccgtttgccctggatccgacggcatccgacataatgcaggactcggttctctgcttctgaattccacggcaattcttttctaatgaaacgtacattagtacaatcaaacacctctctccagtccattcataaaaatctccttttcatgaccctaagaccaatacaaacgcacgctattcccaatctggaagtctgacgcaacagatactcacctgcaaccacgaaaggtccgaagggaacagcagaagttaacagacctccatcagccatttgaccatagtccattgtacctcaaggccctttctctccgcacctccaatgggtgtgaaactcttggataatatccggatcacagaatacatggcttatcgatctacctgcattctcaagtaggtggtattggcggcactggggtaaagaatatcagtgcagccactactgggacttccaaggggatttggctatatatcaagggtttggtcacgtattccaagagcagtcgagacctaaatctctgttggcacactgataaactggagtctggcacacatcattatctctggaacatactcttcaactctacgcacgtctacagttcacgatatggataggttccacgctgtatcctcttttgaggatgaaatagaccagcctccgggcacatttaaacttattggaggtgaggctccttttctcctagattggagtgtttattgacagtatcctgatccagacgacgcgggagatgaggatgggcaatgcatggtccttctctatccgattccctcgtctgacccgaatgtacctctagtgagtcggcactggattcatatctccctgattgagctaattccaacgcatatggatagaactggagcaccatgcgaaaatcagtcaatttcacaattgtgttggctatgacaattgttatcttcacggcgtaagtgaggaggacaatcatctcagattggccagactggtaacattgctcccatctcaggttatcgatccaagccatcttttggcagcagatgaccgttgacctggaagtcacctataccgaattgaacaaagccatgtcggtaaatttcgtcggtctcacaactggttgcatcttctttatcccctttgcgaaaaagtacggccgacggccagtttatatcgtctcaacagcactaatgttgactacgtcattttggacatctaaaatgaacagtttgacagagctgtacttgactaacttactgcaaggtttagctggtgcaaccaacgagtcgatagcagagataacagtgagctacgtctttgggccgatagtaagatgtcctgttaatgttgtacagattgccgacttattcttcgtgcatgatcgggggagtatgaatggactatacctgacatgtgtcatgattggtgtaagtctctcaaccaaatagcccggagatttatgcaggtacctgatgaaagcacgtatagagcttcttgacccccatggctgcaggggcacaagctacacagtatggctggcgctcttcttatcaaacaatgggcatcttcaatggtgtccttttcgtcctcttcctcttcatctacgaggaaacaaaatttgtctctgtgtttattgggcaagcccgtgctaccgttgaagaagctgatcaactagtctcaatcagagaagatggttcggacaattttgactcggggtcttccgccaagggcccttctgtcactgaacatactcgttctcaccatgtgctggacctcactataccgcggaactcctggcgcaaacgccttgccctggtaacgccaacaccagaaccaatttggccgcacttctaccgccccttctgcgtgctcatctttcccgctgtggcatttgctgcgtttcaatacgcggctggaatagcctggctgacggtaacttccagcgtcttgtcactcacattcccagagccaccatacctcttctcacctgcgcaaattggatacactagcgctggtcccctggtcggaaacattatcggtgcagtgtacggcgggttccttggtgatcggtcgattttgtactacgcaaaacgaaaccggggttattacgaaccagaaatgaggttgtatatcttacaccttccagcgattttcatgacaggtggccttatcatgttcggtgcgacgatttctagggtaggtaacggcattaaaagtcaagttcccatttgggcttgggctctgttggtgagtgagtgctaacatgctattttccggattgcaggggatgcactggatctggcccaatattgcaggtgcctttttcggatttggtttaggcagtattagtgatgctgcattggtgctagtcatggacagttacagggaggtatgattatctcatttcgatatacatgatacttcttttgtttcaagtgagccgtttctactaactcctatttctagatcactggtgacgctttcaccgccgtgacgttcatgcgcaacgcggtcggtattgcaattccattcgcgatctctccgtggatccagcgcaacggcatacagaatatgttcatcgcgtgcgggatgctgagtctagctattactgggacgattatcccaatggtcctttggggcaagtccggtcggcgcgcattggcaggccgatatcgcgatattgtgaagaatggccatgctggttgacggatgtttaagtgaattttgcctgcgtgttttttctttggcgacgcggacttcctaggtgtaatttggttgcctgaattggggccgggtgatattgggctatgtcccccgggatatgttgcgaattgggtatttgatggttagatctttcattggataatttaaatgatatggatttttaccattcatggccatgaagttgcggcattgtatgtcttttcgaagagattcctgaagttgtacgagatgatacattgcagtggcttgaggattccttgataggatacatagtacaaggcactccaatttcgtcaatgtccgttggtcataggtttcacatttattcctggtttagaacatggaagcctgatctgaaggagagagcaggaatatgagaaaacccctaaccctaactcatacacgacaggacttagaatattattgcaatgtgattttgtttaactaggaaaggtgataggccgagaaaaagaatctacgtagtcagatgaacaaatgtatgcgtaagaggcaatttaaagattcgccttgtgcacgtcatcaccaacctctttcggcaacgccgcctcagcaaatctctcctccgacacaagcagctgctcagggaaccacgagagatccgaactgacagtttcaccgagggaaggatcctgggcgagcaacatagtcgccaccgccttaccaccaagccaagcctgaaccattccgtctccaccaaacgcagcacaaacccactctgccccctcagacccatgctcagcccgacctgtcacagctccaggcaaccgtcctacccacgggaacccatcggagctgaaagccatactgccagtccacatcgcttgcactgagtcgccttgcacacggccccagtctttgcttccgaagatggcacgcagagccccagacaaatgaatatcaatgtaaagactaagatcagagtctgtcgagacgcccagatccgctaggccgccgtcctcgctctgcacgaagcctccgccgagcatcatctgtccctccggcagctgggtcatgtagtcgaacccgcggtcgtagttgaagagccacgaatgatcctctgcctgattggggaaattgtcaccgggggtctgcgcggacatttggccgcgaacggggaagattcggccccgaaatccgggtacaaggtggctgacatgggcattggtgcagtgaatgacgtgccgggtggttatggtgcctctgcttgtcttgaccatgtatcgttggctgttggcggtagtttcatcgtgtatagcggtcacggcggtgttttcctcgacgtggaagtgatccgggaagtccgcaagcagacgcgtgaggatgccggtgacgaatttgtagggccagagggcacctgcggggccggcgatgacacctcgggcacgagtcaaacagaattcctagaaacgacattagcggcacttggagcgttcggtatgaatgatcaacttaccttcgggatattatctccctcataagatgtccattcagcggcttcctccggcatttcctccttgaaacggtgcatccgctccaaagccgtcttccaaggtttatcgcggaaatagatgctcaggaaccgaacctttcgtgcttgcgtctctgccgtgatgccaagctcctctgcgacagtgagcatctcccggagatgcgccaatcggaagcggatgagcttacgcgcggcatccacgccaaggacatcggcgaatctgctgtattcgtcggctgtctccaggatgtgaccgccattgcggccggttgcgccgctgcacactgtgcgagcttcgagcatgacaatggatgggtgggaggtggaagagtgctgcgaagcgcagttctggagcaagttccgcgcaatagatgctccagtaataccagatccgatgatgacaatatctgcttccttgcgcagatgcttagctccctggctgaagttgtgtgggtttcgagtccagaacgacgaggtcgtcgaactttgggggaggcctgggtcggagtagatgcgattgagagcttgctgtctagcagaggctgaaactgaggggtctgtcaaaatatctgtagcaaaaggcatggttgctgaaacgtcaaagccacaatagagaggaaaagaagagagataggcgggagagaataagtaactcgcaaggagccagagtaggagatgacaacactccccaggtcttacgcgagatcgagaagataggtgggaagattataaaagaaaacaaaaaaaggaggctgaagtagtcaggcccaccattagatcgcaaaacagaagtagcaatcagaagtagcctttggatttgcctacctggtacctacaacagtaccgaggttgacttaccatgctgatgcacctattgactcccataatgaggtaatctcttctcaagggtttcctgtccgcggataccacctgagcacctgcatatgccccatctgatagagttcaagataaggcgctggtgggtcaatcttgtcgttgattgtggggattttagaacacatctgaacaccataagatcatgagaattacgggtatcgttagggtacactcactagctttttttccggttttgtatctaactctcattctaacttgggaagaggccgaggtcttgttacatttcacattgaatttaagccggttcgcgcggttagctgaatcgggtaataatgtgacttgatgttcgatctgggaatacctggatcgatgtgttttattcgagcaatttcccctcgacatcaagcctaagagatggtggtcaagtaaatacaaccaataaagtgaatttgaggttggagaggggcttgaataaatgacagcatacagaggggttgcatttccggttagagagttggagactttagagtctattatagctgacattcactctacgtcattatctttctaatatttgataatattaccatgcaagaatagtagaaatgaaaatgaagcgatgtgattgtacaacccgagtgttatcgcagactcgtttagactcaagcatcaccaagccatgtgggaaaccaagataagtgaaaaaagcggaggtggttacatcgtatcgcagccgagcaataaagtacatagaacgtacataaatagggagatagccataaagtcacaaacgtgaaaccacatctaccccacctctagaatgacatccaaagcacaccccagcagctggcaaatcctcgtcgctgccaaacaccatgaatgcgagcaaaaaattccccgagactggcttctcagcgcagaccagctggcgctcgcgcaggaaactcctcgtctactagatattgatcttcctcgtcgcagtaatctgctctcggatatcgaattagagttgacagaaagttataccgcaattcagctgttggacaggctggcatcggggcacatcagttcgttagctgtcacaacggcattttgtaagcgggctgctattgcgcagcaggttgtgagtacagcgcattactgaaaggataaaggagcagtgggcttaatatatattttgtacagacctcgtgtctcacagagaccttcttccccgaggcgctagagcgcgccaagtacctggatcagtacctccagcgggagggaaagcccgttggtgcgctacatggcctgcccatcagcatcaaagacagtttctgcgtcgaaggtgtgcagtcaaccataggatatgtcgcatttctcgagaatgagcccgcgaagacgaactccgcgctagtggagatgctgctacagcttggcgcggtgttatacgtgaagacgaacatcccacagacaatgatggtaaaaaaacaccaaatgactcggaatatggtcaataagtgaatctaataatcacccagacagcagactcggagaataacatcttcggccgcacccttaatccacacaagacaaccctaacagcgggcggatctagcggcggcgagggtgcactaatagcattccgggggtcaattctgggcgtggggactgacatcggtggctcgattcgcattcccgcgctatgctgcggtgtatacggctttaagccaacaagcaaccgtataccctacggcggacaggtctccggcgccgtacaggggattccaaacttgattccagccgcaggtcctttggcacataacatcgccgatatcaagctgctgattggttccatcgtcgctgatggccaggcgtggaagtatgactctgctgccgttggagtcccgtggcaaaccatcccgcctggtatcaacgccagcaaaagcttgaccatcggcatgcttgccgaggacgagcatttcccgcttcatccgcctgtaaagagggctctaaatcgggcgtttgaggccttgacgcgcacaggacatcatgtcgtccgaattggtggtgacgatgaagcacagagtttggcatatgcgtcacgtgttgcgtttcagtatttcaactacggcccgcacaaggatcttgtttcggccagtggggagcccgttgtgacttcggttgctaagactgcgggaccgatgtcctctggcccgttccctgctcagcaaggtctaggaccgtttgagactatacaggcgttgcatgtggctcgccaacggattcatgatgtttggagacagacatgggtggaccagaagcttgatgtgattctggctcctggagctcagagcacagctgtgagccatgatacgtatggatggcctgcttatacggtgatatggaacgtcttggatgtaagtctttctttcttattctgcttgcttgaccttgattctctgaggtctataccaactttcgccgatctagtatcccgcatgcattattccatttggaaaagcgtccaaagagcttgatcccgatcctatgacaacaagtaacgatgcgcaaccagactgtcagtgaacccgtctcttttatcgaatagattactgacaggtaccagatcaccccgatgaggtagatggcgccccatgcgctatccaggtcattacgccgcgcttccaagatgagaagtgcctgtgggcggcggatatcattgaccgtgtattggccgttcatggcaaggaataatggaaagctatatggctgttggcactgcgcccacctagtcttcttaggcgaaagtctggctggatggctaggtatgctcggaaaattcatgggtatgccattcaagatcatacgagtttagtgactaggaaatatcatttggcgccggttgctgttctgcaagaaactaaattcaaaaggtagaatacatatgtgaaaccggttctgctccgtttgatatcttaaaaggagtgtggaaaggacaagatgttggtacttggaagagaaaagaggacaagaactacggactcgggctatcgtcgtaccgtggtcctccgtcattgccaccatacccggcaccaggtgtagcagccattccacccatcgccggagtgggcgcatcaaacgcggcaggggttggagcgtcatagtctcgttttgaggggccaccgggagtgggtgcgctgaaagctccaccaggggtgggggcactttcggcccatccgccaggagttggcgcgccaggggtcggagcagcgtatgcaccaggggtgggagcggagtagtttccaccaggggtcggggcatcgtcaaaatcacgttggtctctgccgccggacatgctgttccagccgggagtccggccgcctgtggcaccaccggcattccagccaggagtccgagatccagaggcgaaggcatcgaagccggagctggagtcgtatggtgtcttagatcctgatgtccaggacggggtgcgactgccaactcctccatatgcggtacggtttccgtcatacgggttcgcggtacgagagccgtcattcttccaggctggagtacggctgccattcaagccaccccaagcaggagctatataatgatgattagcaacttcatcaacttttccaagatgattgtactcacttctcgcagcagcgccactccaagcgggggtcctagatgaatcggcggcgattggtgttcggccaccagcccagctatctctcccaggaccgcccgaagaagtgtgtggagttcgccctccagggccacctcctcctcttccgcggcccatagagagaggctgtttggaaacgggactgtgaaaagttaaaaacactgtggaccaaagcaatggaggagtaacatactctttaggtgttaaaatttcacgcgggatgtgtacgggcttgttagatgtgtaaagttcaacttgtgcagagctgtcgtccgcgtcgcggacaataccgacgagacccttataacgacccttgcggatagtcacagtctttccgatcagctgatcgcggccgcgacggggtggtggcattgcggcaccacctccaggggtttgcattgccagggcagggttcatcttggtgagatcaggtccagtgggccgaccacctcttgctgatacggtaacaacattcgttgtccgcacgacggagatacctgcgttctcggcttgcgccttattatgcaagaaaaggaacgaacggtgaatgtgacggatgactccactgcgctgctctccgtagacctcacgaacagtatcaccacttcgaatctctgcgccattgcgatcagtagccacagcgtcgcgacggggctcaatcttgtttgcgatttgcgtaggaagaatgttgcggatagaaccattctggtctatcacacggagggactcccggtccactttgatgacacaagcaacagtggcggcatcgagctgaacgagatcatgaacatcgtagatgccgagttgtccatcggcagccatctcagcagaaagtcgaagatccttgctgaaaattgtgatctcctgcatactcatatcgctgagaagagtgacggtgtcatccttgacctgcacgaccatgcccaattcgttctgatatcgactgccgccgataaccttgacgtgatcaccttcacggaatcgtttacggagagttcgaacaggagcgtcgattgtctgaccggccagttcgccctccgtgacttgcaatgaaataatgtcacctcgagttgacactgtgcgaccaataagaccctgctgttcaccccggtaaacctccactggatcacccggttggtatgagtcttcggcggtggagttcttcagagtctcggccagtgacgccagatccagattggcagtcccatcttctcctccacgcgcgaacattgtaacctcctctagccgggggttcacattcttggcattcaagtgctgaacacgcatatccttaatcaggaagccatccacgtagttgtcgttcaagtagttccatgattttccacctagaccagaagtagacgaaagatattttgcgtgcttctttttcgcctctgtctcactgaagagacgctggggagggcggactgtgttgacagcaccgcgtttgcgtttagcatcggcggcaggggcaccaaaagcatcgtcattcatgccatagtccaatcgaggaacaagtctgacagtgacattcaatccattggtttcgacctcctcaatctgggccagatcgcccatgtatttgccacgcttgatgcgaatccaaccaccaggcaaaagctcttctgatttctgcacgcgaagaagatctggcatctccttcactggaactagggtcagcttttgggatgggtagtagaagttaatggcctccaagccttcagtaacatcggcctgcctgcgcgcttcacagtagaaccagccttgcataatgtttccgcgttcaaaagccgagatgattcgaatgggattgcgggagcccgctgggcgctcttcaattcgtttctgaattgaatatacgacctccttttccttgccaggcttgcagcgaccaccccaaatgctcgggtcttccacgctgggaagcaggagtcgtttcgggatcacgagggaatctgttgcggcagcacggttgcgtccatatcgttccttcagcatctgtgcttgcttctctgcgtccatgctagcgtcaatctcgcgctgacgatccagttgtcgatggcggcggtcgtctgtctcggtgccttgaggtagcgcgtcaagatcatccgggtgtgtttccatgccatattcggcgagctcatcttcctcatcatcggcctcgtcctcctcgtcatcgacaccggcctcgtcttcgatgaatggattggcaacgcgcttcattcgcttttgtggacgactcgcctgaaatcgaagatacgcgttaataaagatatcctccattactaggtctccatagagaacataccacatcctcttcctcatcttcgtcttcctcctcgtcgtcatcgtccacttcattctcgatctcctcgtcgtcttcgacatccttggcatcgtcctgctcatcagcgccatcgccacctgagtgttctttcttggttggctgtttcgcactcatttgttagcgttttgtccatcgaggtttgaccgaaatgcatagaccgaccttgactttgagatcctcggcatcagactcttcttggggagcagggttaaagtcatcctcctcgtcctcggagccgaagtcttggttgagaaagtttgacattttggcaggtagtatctagcgcgctattgcagataatccggtcgccactttcgacagtatttagagttcgatatagtcggatttctatcaatcaccaggaatattagtgaccgaaaagacgaagcaaacatgcgaggaagacaaaccgtacccaaggaaaccgcgctacaacttgaaggctgggagatagatgtggataacaggatgcaaagtgtcaagtattttctgacggacagccaattccgcgcggcgtgaagtcaattgaggttgatccaaacgagagaaaagcgactggaaagttgagaggaggcacagcagacagttgacctctgcgggcaatcaccgagttccgcgaccgcttacaaagaacactgatcagaatggagacctctgggtttgtgagaagaaaaaatagcctgaccacaatgcaggctgaattatacctcttcttataaaggatagtttgagaaagggaaaataaggaattgaagtgctggggcgtggaggtcgagttgcccagaggcacaatccttgcgtagatggtcattgtggtgcgccgtacttggccgccttttgagtccagcactactgatgatcgtcggacacgttgacccacttttctctactttctctatatccaaatccccattcgaggatttacttcattttgacagcactcggaggtccaaactaccaaacggactatgacaagtgctacacgacacgcgagtcccctatttatcacgcgtcggaaaacgtagactaatcctgtgatcagactcctccatctggatagacaatagacccagaagaactcgactacgcaggtgacaggccaccggaggatggctgaagttacgaagttgcccagataggtggagagcttgttccattgacttccccgtcaaccttggatgaagtcattgatgtgatcaataagcgcggtctacagtcagtgaagtccaagaaggcacgaaaagtaaattttcgcaaacgatgtacaacatagcaatatgaattccaggcaatatgccctatatgatatgattaatgatctcgggctaatcctatgctatcttgaaggtttcccttattgaacatatttaataaccatgtgtggcagtaagcttggtgggggaagaagatgatgatattatgaaccccttggtgggggtgctatagcctatagctaactatgactaagtacctgtgataatatgctgggcctcaaaaaatctcggcctccggctgagaaaaaaaagaaaattttaataaaaaaaaataataagaaaacgaaaaggtaaaggtgcgatgtggcgtattagttgttgtatacctggggcggagtgtagatatatgagggcgtgaatttatacctggggttgtacagtggacccttggtagccgcttcgagaggagcttggcagtggttattatattctttattatctagtagtaataggttctctggtactgtcaggaccccagtactaagaaggctgatgcctgaagtatgagacctgtcacagtacgtggaagcacccgtcccgggtacgtgggggactatggactggacaggagcaatatgtgctgcctacatagtccctgtaggtcatgtaacccacaacctatatattatcctcgcatactacttctttagagaggcagctattagttccaatataccactgtatatactactatctctatttcccaatcctctattatatacagcattcccttaggcattctatacctaggggtctcaagatttcttataccctctatatagtatctatatagtactctttagggtactctttaacgctatcttagataaataagttatatcctattaatactttatatagtaactttctagttatactataagttattatattatatataaatactgcgataggaagctggtatacctagctatcttactcctagttagatatcggcaaagcccacccggcccaccaatgggctgggctttgggctgacttcttcggcccacgctaaattatgggctgataccctaggcccatagcccacgatgggggcccatatgggccttatataatacagtgatctacctacataattaatgcaattttaggcctgtattcttattacagcgctctcgtccaattataattcatacatatgctaagcatatgcctagcatagttaccaatatatatttaataatatatctctgcgatattctgatatatatatatttctaccataccaattgttacgaccccgagggtcacttgcacaactggcccatatgggccgatatacttgctaagtaagcgccaggggtatatacacaccgcgcacatgagatttagaaccttagcgattagtctactgaattgtataacccacgctagggacctccactctaattcaaacctccatttttaggatacactggtagctagtcctaacattctaatcgcttcatttttacgaattagaccactggaacccataagatacctcgaaatacccgtagcagaagccgggtgttatagggagatatacccctacctgccggttaagaaaaccaaacgtaggatttacaaacccctactgagataggggccatacctgccaaaagagccgctcctataaaagagggggctgcctaaccgataaaattggcaccagctttaagctgggatcttctgggctcgacaatttccctcaaagctcaccacgaatgcatgggagctttgaatttgcgcttcgatttgcacaagataaccaagacgtcagcagtgatgaggacgacaggaaggaacctataatcgatgatcgatttgctaggctggtgtcccatggccgcagctttatcgaagagagtgctgcttttcagaagttgcgagtggaactcaaaaacttcctcatgccgactttcaagcctatcttcctagatttcagattcgattcagatgaatggatgataagatgcttctggtgcatggaaaaacttctatcaagcatcgggcctttagaggagagtgattcgtcacatctattttctacccgaccttcagttctgacaccatctcgagagatagtactcttttctgagcctatagctcttgatacgaacgtccattccacagagctacctaccccttggtccagcattcaagttatcggatttctgggtcttagcttcaaactcaaccgcttgcagtgggcgcggtaagaatatcgtggaaccctcaagagcttttttccagcttcggtttgcaaaatttgaatcccttaccacaacatcaaatagtgctactatgccaaccatgttgtcaaagtgaaccttattataaaagttcgacgcgtttcacgtgggagtacgtgggagtggaaagcaatgtcgatatgaaagacttcaagggaacaatatcctgggacccagccaaacttctacgcaaactctacttgcgagagaaaaaagtcccgaagtatcacaaacggtttaggtggaagaatgtgaggtccaactaccttgcaagctcatcaaagtgctaataatcaacagcgacacggtaaaaggttatatgatgattacattgaacacgagcatggtgctctccaagccctccataactacctggatgctaccactgttcctaacaaagggatgacgcccagtgaaagtatccagagctcctcatatgcggcccgtctctatacaccaaatgccccttccacacaaactacatatccattaacgaccattgatatcgctgaccagcctgcaaccaacccctacaattttgaaaccagcaacgtgttccatgatgttgaacaaccaactaaatccacacgctcactactcctcctcacttgcattaaacgccacggtcgacctgtcaaactccaccaagaatttgtcacgcacatcgccgacgaccgccaactcttccatgcattacgcaagatatattttaaccaccggcagaagtttgaattcttttggtctttgaggacattgcacagcatccattttatgagggtgtgtttttcttcttcatctaatgatgtcttgttttcttggtaccaaagctgggaccttacatcacctgccctaattttgacgtatatcatcctgacatatttttctcagttcatctacgctggcaactcatatattgacgtccgctgccatgctgaaatttgcactcccagtaatccttgcgcctgtgtcccacctcctggccttgttccaccccaggtgacctataactacacctaggtagacgactcttacctcaacgactgactaactgcatacccttacgataagccactgttcccgattggtgccggggaacaaaaagcacattttctccacggccatatcccggaacaatcgacaattttcagagctggctacttttgccttgtttatcttcactggatagtttctggccaatatatatttttcatgctatcggcggtatgcaaactcaagcaattcaaggttcttatttgcagctctctagtcgcattggcgatcttccgccagcctatatccaatccctggtaacctgctcctcaagagtagactgctgcagacgacgctcacgctgcttaacgccatggctaaactggcccagactgggtcgagtctgatatgccctccactggttttcacaggatataaaactccagcagccacaggtaaagcgatgagattataaaccaatgcccatgcgaagttgaacttgatcctcttaaagacaatgcgactgagatcgatcagtgtcagtaatgagtccaactgagacgaaacaagaatgaaatcggcagaggagatggcaatgtcggaaccagaaccgatcgcaactcccacatctgccattgtcaaggcgggggagtcatttatcccatcgcctacttgaatcaacgttcaacagtgctgtttcaatttttgtaatgaacactcaatgaaatttccttgtggcatcaccgcccgctgctgtctttccacgttcaacacatactgtagttgacgatgaaactaattgattgagaagaaaaaagaaagaaaaaagaaaagaaaaataaaattacactatcgttgattgattctcaacggaatttatgaccggaatccctgaccggaggaccttaagaaatgaaaatggtggaaatgaaataattcggacctccaaacaatgaggggcctaatgaggttgctcaaattttgatgagctagagtactgaagtgtacaagcgtgccggctggaaatcatccatccatgccccgtaaaaaatcaaagtaccagagttgatcaatgttgaatcaaaacaaataacgtcagccttcaagattaagggaacaaaaaacaccgaaaccgataaaacggaaccctcatggccgttgagtctgaatatttttatttcaccatgcttattgtttaagaaattaatgtatcccagcccgttggaaaaggccacccgcaacaactctagtaacatttgaccacaaccgttcttaaacctcagtgtaggccacacaatgtagatgtgccgttgagatggttgctcaaagagaaatcatgttcatgtgtgtgttgagtgatcaaattcatactgtaacttgttttcgtacccgttgtgctacagctgagtagtcgtataattcttctggcaaattcataccttataaaacctctctttttggccctttccctcgctgggttagtcacaacgtctttgcagcagcaggcgatcccgggcgatgaatacgatgaaaactacgaatcgctcgtccagaaaattgctgcgccaaaaacaatgtcgccgcaaaacaagtcttatgaaaaaagcatatgagtacagcaagttgtgcaacgcagatgtatgcatggggattcgcatgcgggagacgggccaggtacatattctgtcagcggattcttcgggcttttgggcttttcttgctttacaactagtaagctttattatgacgtcatgttaagaaataaaagctaatttgattagaactcctactatccgactccaaccttgacatccgaccgtgattttgagaagagcggggaggatgtaaaggtccaaactatgcaataagatttcaacttgttatctacttagaaaaatccagttctattgaaaataccgtccgttatgttgctcgttgcaaaaagccagctatgaactcgtgtagcttgaggctattaggagcggcggtgattactacagagcaggtgatcctaggccgtatccttctggctatggatctaagtactcagccagaaatggccaactagcgtccaaggtagcttagcagccttaattatctgaagtctggatttacttcagtgcacgctttcaatctttcgatttctatccttattatatcccataggcctactgtcgacgtttcgcaggtcgatgatgatcgctgttatgtcccatagaccagacctcaaagcggttagcgtgtctcacttcgttgctcataaatacactaatcccgaaaaggaaagtcggccactactactttcctagaaacttacagtatcggatcaggagtagagtagaatttacttctatgggccgggattcatggtgagacccataccagtaaagatactctgtaggaaagaatttcattatcattagcgattatttttctaatgcgaagctagaagttaaaacggggtggggcagggaaaccaaaatgagactggaagaacaagaatcaggaacttcggtacttcgtatatcctcgctttgcgcaagccggcgactggtgcaagagatattattctttttgaggagcagtgcgaacaatttcttcaaatggttgaattacccgaagagcaacaactgcgaccctccatatgagacgcgtctttccttcactccgtccatcgataagctcccactggagacgaacgttagaatcacctccaggagctaataccctcataaagttaagggccccggtcactgtggagtaattaagccaaagattttctttaggaccagggataccgtagacagcgctatagtctaaagagtaccgaatctctctagtaaataccctaagggtatcgccttcctagactaatataatagggcaaactgtgaggaattttttatccttaggctaaatagtgataaagatagacttatttcgcatcgcttctgcctttatttgtaagttaaagaacctaccgagcagtttagctgatactttatataatccgcttaattagaagatagtctcctctatactagagaaccacgggttaatagcgcagttctatacaatcccaggaatactaagtctatctattaagagcggttgccttaactatagtcttcctattaaatcgcctttactctccgcgaccactcgctcttccagttatttaatatagaagctatacctttcttcctagagtcggacaatctctattagagaaaccccagcttctaataaataacttttacagaagcggtcaaattcctttatatagtataaaagaatcttatcgatacctacgttccgtatatcgaacaatcctttctagaaaagacggcactacctttaattagcgaggctaagtctatagcccgcttctctcataaatcgctcggtagcaactttctcagccatcgtgaatttatctagagggcctttcgaagttagcaaatcctttaggtcaaggagctaggcgcctttcttaataatctcccaatatatggtttcgttaagccgagactatatacttttgcttacagagaatatattctcctaattgattagctagatagcatcggggtattataacttaataataccattcataaagctctgaatctcttcgaccttcgttatcaggcttacctgctttgaccgatgtccgtatcttctaagggaatcgttaagctttatacagttcacaagtatattctcaatgatcctatgcggtactttcgcgtattaagaaatgtctatggcggacaaagacgtcccatcctaaggtataatcattattacgttcgcctcggtcgtcaacgtaggttcggatagtatatcaccttcccgacttactacagagtgattcgcctcttgtgccgtatctttggcagtattatttcctttgtttcttcttttcttcttataagacggcgtatctagccctgagtagtccacttaacttcttttttcagatatagggaggaaccggtaagagccacgctttgcttctagatccggactagctctgggagtaagaagaggtggtggatctgttatgcctacctagagcctcttttcgcggactatacatgtcagtggaaatagtctgccaaggagcgttctgggcctcaccaaagtcagaaatgcctaggatgtgttgtttaataggttcatagttgcagtcgccgattccgcagaatacaagcaactcctgaactttccctgccgtcaaagactgaaaagcttcctccatggttgtattgtgctggggaagtcagtcacaagagaagttgtcgaggggagatgctgcgctgccgcgccaattttggttgcgcgggtgaaactaacccgaaacgggaaatctggagtctagaccctaccagaacaacatagaaaagaagggaaagcaaaagtgtgcgagctcaacgtacttcgcgaccacattgtgttcaatgtccggtatagtacacgtctcaagagaagtaataaaggagactccttgcgtgtgcgtgagcattcgacaacaagacgctcacattgtcctataacctctgctacgctgtctcccaaagtttcaccaaggcaacgatatggcccgtctcgacgtaggcgaccagttgaccgctattcgccggttgattgagttatccaatcaagcatgggtacctatggttcacattcgggaacatcgtgcaacttgggatagttgagccatattatgaattgcatcttgatcagaggagcagaggaactatgaatggtcgagatgtgtacttgaggaaaggacaggcttcacaattcatcgtttcgaaatgaaggccatattgaaattcagtgtgtttacattcctatcgtgtctgaagacaagctttacacttccaagagcccctgagcttgcgccttcagggggcaataatcgctatcatcatgatcatcctctctcttctctcatcttccccacaatctacgaaactcgttgcaccagcgagccgatcttcatggtgaaaccttggaatccgtatcactttctcatcaaagaactgtctcttgattctcccttttatgaacctatgtataagttagtccgaagtttcttatgatgtaatgaaagaatctctgaatctccatcaccgacgaccctatgtaccccactgcaaaggccaactacaccacctctgcagccaattaccctcatttccattctcttcctccccttccgccggcggccaaacagaattaaaaatgacctccaactgcgcagccccctcagacacccaacgacgggcactctgcttctgcatatgctttacggccttgacaccgaccagaaggtccgtctgaaccgtccaagacggagccggcgctttgaagatattgcaattcgacactattgatatgcttcttgcagcagctgcaggtgcactatacaagggatgaatctttaacttcgtgaggcactgacccctaacctggtgggagcggatgtgtgtaaatatagtcttggccagatccttgtcgatagcggagttaatcattgtgtctctgatgtaccagataggcacctcgaggccggtagaaggcaggggttgagacttctcaaattccgttaggtcgcgcggtggaactggggaggggggttcgatttcgttggggtccacaagcggtgggcagttcaggtagagctcgagagttgttagagctgggaacagggcgagcgcggtgtatgcgggtgtttcgaggccgcgattgcgttggatggcgatgcacagggtctggagggaggggcaatgggctgcaaggggatggatttcctcgacggaacatattgggcctgtcacactctggccttttgcgcggagtcggcggagtgtctgatggttcaagtcttgggagccgacgttgagctttagttcaagtagcgttgggccgtgcttgcgaagggcagtagacaggagggctggtttgtagctacccaggaggcagaggtatgtgagcggggggagggagtcgaacattgcctctacagctgtgtagaaggataactcgtcgtcttgcggtgggaagagagcgagggtgagtctatttagctgctggaagggacggagaccggcaatagcgcgcagtacttgggtctcttcgatgcagccaacggtccacgattttaagcagctgtaatctactagcttatcccacttgaggaactgcccagccggcattagggtattcagcggccacgctagctgttcaagctttgcacgcagtggttccaccccaacccttccctcaacaaccaccgtctcgctgaagtcttccttcgggccggcctgaccacccgcgacaatctgtaatgcaagtctcttgacatgcggtgcacgaataatcatatcttcaagaactctatctgggtgctccctgaagttcctgcgctccggatgctcgaaaagagtaacatgtacggtgtgcagctgcggcgatagaacccaatcgtctgtctttcgatacatgtctcccacttgaggactcaagtagacagatgatcgacaatctggatgatactgcctgatggccttgtgaagctcgacagggccgccgttggacataagaagatcaatatcccgcaattgagggaccttgtgaatgaggtcaattacctcggcgctctggttcgttgaacaacccctaaatttgggaatgctttgacctcccaaattctctgtcttaagcgaagcccggaggccgctgtaggcacgaagcactggtgcgcgcggtgggccgctaattggataccatgggacgatgatactgagtcgctttatgtgtacgagaacacggctggcttctggctgccagtgaaacttatgagagacatcatctttgagtggacgtataatgatatgctcgtacaagagcggcctggcaattctgttccattcttggtccaccagggagagtgcagccaagctcttcatacattcatcgcccatctgcagatatggtcagatatcaacaccattggagaaaaggtcgacgtacatatctcgcaatcagacatttgatctctgatggcagtcggtccatgatttggtagaaaggtttgatgttgaacagagagtaaaaaaagctagctcggggaaaatggctttcttttacacagagcttacctaataccacgtaactaacgtaatccacggccgttcggaacaccccaaaacaccatactaaatgcgataaatgaccacttcatatctcaacaatcatatcaatcaatgataatatacttaaatgatagaatctagagagtatttttagcccacttgcgaagtgtaggaagattactggaagtattaattaagatgtatgtattcaccttaaagtgacgccgtattttgtagtaaagcattgaaataaacgtccagactgtttgaaactaaggctttctatttcgcatgctaagaagagtctgtatggttgttgagatatgaagtgggggaccctctcctttactactggtatttaccgcctgttacatgtattgtttctgcttgcgttacgtaccgtttttggagtacaagattgtcagtttccatcaaatagtaatacacgctcctacacatctctgaaaggtgtcccttcgggtccgtcccggtgtctgctacgactagagtgatggtttgtggtttgttccattactgctgaatcgacccgtgtacctagagtgcacagcccagagcgttcccctcttcactagttacttagtctacttcctacctagcgcaaaacacgtctagagctacacccatggatagaactcctgctctgctccaccttcctccacgggtacaacccaacaacaccctaactatcagcgatataaaataacatatgataacagggcgccatccccgcgctatcatccatatccacatcttcatccgagtccgagtcctccacatccaactccggaatatagcactgctcctcattcgtccaaatccgcaccttcgaaattgtcttcaagcccgtcaccggagtcacgctctgatccgcccccagtgccgttttatgattaatgagaaaccaagcctgcgggttcccgtttggcgttcccaggagcgcctgccccgtctccgtgctcatgtcaaactcccagtaaaacacctcggccgcggacgcgtcattcgccgtatcgatgctgatcgcttcctcgatgatcgcccgcgtgttcaagttcaccacgttcatctggaacatgtacttgatggtgctagggtcggaggcgcgcgccgcccactcgatccacatcacatctgacagctgctgaatggcgggaagggagtcagaggagtcccacttgccatcgacttggagctcttccttcttaaagccgggggaccaggcgaggtccacgattatggcgttgttggcggtattgtaccagcactggtagttggcgcccgtggcctacttatttgattagtatgtttatctccctgtgggttactttccggcaggtcaagtagaatggaaaagtagaatggaaaaggtgcaagcgaatttaccgggtgcgtactatccaccgccaccgtgtgctcccagttcacaaccacattgttggatggggaaatccccagctcgttgagcattgtctgcccaacatactggacaaagttctcggcaagaccggtgtacgggttttggtcgattgtccagccgcaggccgtaagctggtctcgggtcagcgccgttgcaacaatgctgcgatcgaacttaatcagggctgtggcgtcggagtacccggttgcacatatgaggccgctgcctttattcttgcaggtgtcgtagtatgcggaggttctcttggcgagactcttcacaggcaatgagaagccagaactgaagcgttcgtgtctggggaaggcttctgcccaggtgctgctcacgaagagggcatttatgagcaggaagagggtggctagggagaggccatgtttaaagagggtcatggttgggggtgctcatgcgtgagctggggtaagattggtaaaagagtgtagattgtagtgagagaatgaaggaatacaaggaaagaaaagaacgaatgccagtgtgcgatggaaggagaaaatgtcgagatttgtctaggtatagggagatgacaaggcgtaataaagagtaagtccctctgctaccgtatcatttggcgatgcctgctcttccgagggctgcggcgttccttgtcataacttccctcgctagcaactgcagctgagcatcatttctccttcacttctgagcagcctcttacaagcgagtactttcatcgtaatttccggaccctatccactattacactagctcgacaggaacatgtctttggacaccaaacccttcatcacggccggagacacgatcaaaacggcaagagtgtacgaggcatgtacccaagtttggctttaggttccatttcttcatattccaaattctctttcgtcagttcatagtccaggatttttcttcttgcacctaaatccctcaacatccagggccccttacaaataccatacactagccaccgtattaccaagaccataaaatagttacaggccgccgggcggagccatcacttagagcgcaatgctccattgctccactaacgcaacctgcgcctgatttgtccagggagctgctatggccattacactagccaaaatataatgtattcttcatatcaaatatcgccaaacgccggtcaaagtgtcggctttccggcggtcccggcggccgagagaaggtaggaactattggatactttagtgcatttatggagtgggtctcagacatactagaaagggagcttggataaaaatgtacctgtagtaaagtaagatgactttgagatctcaccgacggtcaaataaatgttgaaaatccaacgcagttgtcagcttttgataaaccacgcttaatgagataattgaaatttgaagcctgaaatcctcaaatctttattaactctaatgaggattcgaagaaattccgtatcgagaaagaaaacaaaagaaaaaagtatagaatattttgatttgtcaaaaattgccgaatgcggcgctggaatttccacaggaaatgccgaacattggacaaacaatggtgactcggaattgggtactagtagcatttgttccgaggactggaaactcgaattaatgtatcagccactttgatcaccagctgcaagattttcagcgaggagttagtccgaacttgaaggtccttcatgttcaggtcaattcattaggtaacatttaccactggcattgggagtagattgttaacatcacatgaaagattatacatgaaatattcttgctacatatgtacttgacactacttaaattatgggcctcttattcacaagtgcgagatgacatgttcaaattgcagtcccccggacttttctatatctaacttaagaaaagttcacgtcactgcccagtgactccacagtatgtcattgcttaattcatgggtttcagggtggagacttcagtgtgggaatgaggacataggtagacgtaacatgatatgaaaggctcgttcgtcagagtgtgatcgacatcttcaatcacgagataccaatacagacataatatccaacccacagagagctgcaagtgtcaccgacagtagggttccaatcgtaaaactcatccagagtgataccagcatcgctggcaatagttgcacactcgtctccactgataaccagatggtacgcatcacagttgtccaccatgccactctcaatgggcgaaggagtggctgatggggcggaagaagaaccggaagtcactgttgtggtcacaaaggtagtggcacgagcagtggttactactgccgagctagaacttgcagccacgccaacacagacatagtcatcaacccagagagaggcgcaggtactgccaacggctggattccaggcatagaagttggtcagactaatatcatagtcgctagcgatggttgcacaatcatcaccactgacgactagataaaactcgtcgcaatcactcaccatgccagtttggataggagagggagttgaagggactgaagggattgaagtcaaggccaaagatggagttgcagtcgtagatgggatatagctcaaggctgcagctggtacgggtacagaaggcgccacaaggtagctcgagggcaggtaagtgccaacgacaaagttcacctgtacgcagtagtatagatcaggaagcatttcacagcttgagccaagatccattacaagcgggttctaggtaggaaagcattagtaaaagtacaagtcatggcatcaagagtgtcatttctttacccattcttcaaactgtgcggcggtaatctcgtaaagcacttcgactgcctgacaagtcgacccttcctgatacaagtaccataaactgcaatcctcgctactgccgggggcggcaacaccggccgggctaacaagatagcctgcagcctgcccgagggaaaggctaagggcagacagagcccaataaaaagatttcatggcgtacatggaagaacaaacttgagattcggaacttgaacttctaaggttgaacttgaattttcgggttgggattttggatacaagtttggaatagatagacatcggaatatatatgataccactctcgagattgaatagcttggacttagaactcaatttctccgcaacacccggggcctatgtgcaagaagactccaccacctccgaaattccaaattcccaccgttttcacgggaacagagatttctggtcagaagaccactccgatagtcctcctagcgatggtcggagccgggaggtggggattagattgccaggaccgtgacatctagaaaaatcatcttcgtatccacagaagccgctttccatagagtcttcaacgaaggatgttttgaccaaatctagaaacaagtgccgtatattcactggtcagcggatcctgccaagaaaattccttaagtcaattttcacgaggcttgtcaggcttgtcacaagcttgtctcccgccgtaggctagatgtgccgaaaattaattaatgagagcaagttatcttttcacgttaagcaaagtcttcgctacatggcccaatcacctacctgtgtatgaatctggattgttccgtggagtgccgacgctaagcattggtgtgtgctatgtggagaccctgctcaggtgggattggtgtgtccatgtcaaacggccccacccggacattgcttatccttagaacctcaactagcttgtttagtgcagcagaatatgtaaacactcacatgtgggtaggttgttcggtaatttttgaattcggccagattccgaaatcctactaatttactgcagggctcgccttcccttcccatctccactccgagttacagcctagtaattgagactatactggaaagggagtctttaaccacatggaggagcaggagttgagatgatttcaacgtaaaccaatcagaaaaatccctcatctggtcctgcgctttgccaaatcattttcactgaatttagtctgaatcctagcttgaaaccgggattttcaactaaccttttgtatgacggtggatacaccgcttgaattgtcagtttaggaacgtctctacgctgacatttggtcctgagtttcccttgtttactaaatggtcattcctcggaagtaaagactcttcactgttctccatcaacctacctccctttgcctgagagaaggctatcctctcatttgtgaccctcagtggtctcttcttttctttttcttgttggcagactacctttgtcaattggcttcattcttgactctcgactttcattcattcctttttttactttccatttcatcatgcgatgggccggcagtttggccagtttcctggcatggacacttgtctcccaggccgtgcattgtatgtgcacgaatgtgaatccagctgaggtttcatcgtctgttagtgcgtacctggcagcaaaccccattgccacgcgccaggcaacccagacagctgatgcagcgagtatgatggcatccatcattgccggtgacttcaagcccagactcttcgcggcgagcaggagtcgatgcccagtaagctgcagcagcagtggcctcagctctactgcctggtcagtataccacagcgtcagacggcttgatctgtgtaacaacaccatgctgcttgatttcaacatgttcaatgagctggatgatccaaacacgcataccagtattgcagcttgtaccgcggactttgatttctcttcttcagtcacaggaagctcccaagacagcgcttgctcctcactttctgtcagccagtctacaaatatatcttctttggagctagcctcatctggatcaacatcctccactggcgtgtcagacattattgatgcccttgagcaactccaaaatttcttcactgtttctggctccggatgcgatgacgcgattcagatcgcctactcaggtcaggcggcagtcggtgtttttgttggctctggtcttcacagccagggtgtcatctcatctatactcaagaaatttatgacccaaattgagacagatggcaccattgccgaggagactctcattcaactatgcaagggctccacagctagatactctctcggcgtgttcgccagtaccgagggagatctcgtttccgtccagaaggcgattcagtcctggagcaatggcagttgtataacttcaatggaggagtccactcggaactggcagagcctctcgttcacggttgcatcctcgaatcaaaacttatcgtctctcagcaactctacgtattcaaccggaaatgcaattctgcctggtgcgaaacgctcagcttctcacccacagcatgcctactcacattcttatcttcattatggtcgtgcggtgaaaactcaactgcaagcccgtgacgatagtgacgaatgcaccaccattcaagctatatcgggtgatgacccaacctctctcgccagtgagtgtggcatcacggttgctgaatttgacgagtataattcttcactcaacatgacagacctccaagctggacagcacgtctgttgcacgaacggaactatgcctgattacacgcccaagcctgattccgatgacaactgctattcgtacacagtccagactgatgatacctgcacagctctggctgcggcctacgacatcactgtcgccgagatcgaggactggaacaccggaagcaatggaacgtggggctggatgggctgctcggacctgctggttggcagtcatatttgcttaagcagtgggtggccgccaatgccatcgaccatttcaaatgctgtttgtggtcctcaagtcaacggcactgccaatgcaacccatggtaccgatttgagcaccctcaacgagtgtcctctcaatgcatgctgcgatatctggggccagtgtggtatcaccgcagaattctgtaccaaatccaactctactacaggtaacccgggaacagcagccaaagatcaaaacggatgtatctccaactgcggtactgatattattgtcagtgatgccccagctgaaatatattctatcgcttattttgaagcatttgaccaaacccgaccatgtcttaccatgtccgttgatcaaattaacaccaccttctattctcatgtccactttgcctttgcaaccctcactagtagctatgctatcaatgtcaccggcatagaggaccagctttctcttttctcaaacatgactggcatcaagcgcgtcttgtcgattggcggatggtccttctctactgatgcatctacttatatgatcttccgcgatgcagttacttctgccaatcgtgacaccttgatcactaatgttgtagatttcttggagaagtgggacctcgacggcgtggactttgactgggagtatcctgatgagccagatattgagggaattccagcaggaaccacagcagatagcaccaattactatatcacactggacctgctgaagacctccatgccaatagggaagacattgtccctcactgtgccagcctccttctggtaccttgagagattccctatcgaggcaatcagtaccgtggctgattacattgtttacatgacctatgacttgcatggccagtgggactatgacaatgcttactctgacgacggatgctcagctggcaactgtttacgatcccatgtcaatctgaccgaaaccctcagcgctctgtctatgatcaccaaagcgggagtttcttccaacaaggtggccgttggaacggctagctacgctcgctcttttgaaatgacggaggctggctgctggaccgacatgtgcacctataccggacccgattcgggcgcctggccaggtccctgtacggacaccgcgggatatatctcgaattatgagctcgagctggtgatagcagagaacccgtctgcagttcagtactgggacaacagctcgtatactaacattttggtcttcaacgagactcaatgggctggatacatgaacgataccaacaaggcagtgcgaaccaccttatacgagagcctgaacttcttgggaacatcagactgggccgttgatctgcaatcggaggatggcaacgaagagagtgccggctctggtgtcatttacatcagctcgattatcttcaatgagactgacccagaagtggctggttacccgcccttcacgatggtatggcctatctcctcggttgagcccatggttgtcaacttccctccgtatccatatgtttatattgaggggggctatgggaccacttcttggcactccgtcccctcaagaactgttgacggaatgagctacttccagtggtcgggaccagcctcgggcgtcccgaccacaacgtacactcttacccccagctacagtccctcgccactgacaatcatcggtaatgatggtgatgtgcccattgtggtgtatccgccccctatcgagtcacccttcactacaccgtacgctgtcgttgatggccagagttacatggttatgagcggcacagccacaatcggtgatacgaacgggctttctattatcacgggcattccctctccagccgccacgccccagacagtcactaaagtcatttacgttgaagacccagtcagcaccgccagcaccgccagcacagcggccaacaacacggtagtagttgtggtattgcccactgacgattccggctctggtacgaataccctgccacagacaacctccatatcgggcaccatcatatatacttggtcagagcagcagatcgatagcttggccaccattcccacgactactaccatcacgacaaccaatgtcaacgacaaaacaaccactatcgggatcgtacctgtcaacaccggtggcttctactggtcgccagtttctgttcctgatattccattgccaacagtgcctttccctgatttggcgccgattcccactctcccttgctttaccctctttgatatcttcacaattgattgcccaccgagcgatgacacgaaaagcaaaagctccaaaaagactgtcaaatacacaagtgcaaaggaatcgcccacttgctctcccagtacggccaaatcctgcggtgtactctgcacatcaaattgtagtccttcatcgacatctacttcgacaacgacttcttctaccacttgcagctccgaatcaacagttacagactactgggtctcatgtgactctacagcatgctcaaccacaagcaccgccacggtcaccgggtgtcaagtgacagctagcacgacgaccacgggtgtctactgtgcagtcacctctatcaccaacatttggtccactgatgatcaaggtgaaaacggcggtgaatactttacctccagcacacaaaccattcccgaggaagttgtcgcagccggaactacctatattgctggttccgatggggccgtcacactcggcaatggagatgtcattactgttcctaccagcgtcgctggcacaaccactgttacccttggcacagttgttgctacagttgacccctccgaagtgactgtcgttgccgtggttgtgactagtgaagtagtcgaatctacttccgcaagctctacgtccaagactgaatctacaacgtcaacgaccaccaagaagactaccagtactaccacaacagtctccataccaactgccactgagttttgtgcaaagtatgttattgaaaacgaagacacctcattggacaagtacggttctgagtacgatgaatttgtatttgttatgtggggtatccagtgggacggacttggatcagcggatgctgaatccgagattgagggcatcttggaggattgtggtatcactgcagatattcatgttgcagttgatactaccgaatggggcacagtagcgatgtggaataacggcgaaaacgacgttatcaccccatgtgtcaaactgaaaatcaaggcattgggtggtggtacaccttcttgtaaatggatttataagacttctgaggatgtgaactacagtgccaaggattctgctgaagctgagatgacttggatctataacaatcacaaatctgtgatttcggcgccatatcctctggcaacctgaacaaattgatatgcaatctgatcttacaatcaggacagtcagtcaactttctttccacaaggttctcttacggttgttcaaccttgaaatgcttctttttgaagatggaacctcattcacttgtacttacatttttcttttatcattttgaatccttggctcatagctggtccaagtagtctacacagttccaacattttctctctgtaaattacatctcgcttcagaatcgtgtgtacagattgcatagtgatttcaaattttaagtggctaactaagctgcagcaatgagatacatacatgtatcccccttcagaaaaagtcttactgggccccataagacaaattttcatcgaatctggaatgcatgaacactatggagtcagtctgttgcacaaacactttccaatggaaacgaaccaacggcttgtggactaccgaaacatttcggcaccgtggactgtcaatgacaaaaacgctgtggtgtccaaatatgaaggcttcattgtccctcgatcattcaggtttttcgacaaaaaattgacaccaatcgaatttgaattctcttcattcttccctcaaggaaactgcgaccttgagttctttgagcggctctcgtgtcttctccatgatcacaacttggaaaacgtacttggagttcgatgcctagacaaatttgatcctgaactatccgtggaggtcactgagggcaagaccaacatcatgatatcgcggggatctgttcagaactcagagcttattgaagcattctggattttcagtaccgacgatgaccaaagatgccattgcagagaatcctgctggaaagattccgagggaaagcatatcgaagaccatggatgctcttgaggcagtagaagatgtcaagtttcctttggcaagctagtctgaacaacctgtcatagatttcatccttccggacaatggagattacgtcattgacatttgctattcttcggaagaatgacaagatttgaaaacacccaactatctgtatttcacaaagaaaactccatgtttttcctggcatccaggtctgggttccgtagcatgctagtaaagtttccctgctttgtttccacaaccccaaccggttcaaaaccaaatttagagtatagctgaacaccatcgggagaggataaaacaaaagtatgaagctcatttttgtccacaatgtcgcagagcattttcaagagcgtagaaccaacacctttccgttgatgatcagggtccacagccatgaatgtgatcccttgagataggttaatgaggctttgaaaggtcttaattggttgcgagcttactacatatttcattgtcatgccatttttggaacactctttgcctctccgctctgagcagtttggagatgccaagccatgagggcacgtccaaagaagggggggtccagctatcatgatgtcccatcttcctgctctgcctttcttcggagttgattatcgagtcatcttggatgaaattctgaccattaatcatcccctttgagaagacacctgagcaggtggtccaacctatcaatccgacaggtaggccatctgctccgcatgccttgtaaagcgattcgttctctcgacaaattgcttcatggattccatcaattgcccatttgatttcatcttcattgcaatcccactgctgttctgttgagagtgggaacataaagcgacggagcggactatctaggtgcgcaggaaattcgacccgtcgtacgagcacactcacatcctcacttttgacaggcgataaggagaatgccatttgttgctgacttgcaagaggaagttttgatctttgctggatgtcttgacgtacaagggagaacaactcacgatccacagatgagtcacatgcctcttactcagccaatagggcaaaatttcggaacgtggtcgttacagtacggactagtacgggcatagccaattgagtacttgagagtgtgaattgttatatactgctgaagatgcacaataaataagggggttgagcttagtaatggaggtgctgaatattccccgggcgcactagtaacatggcgaccctcttttgtcgacacaaaatccttgctagcaagcacagggaaataatttttgccattagtagctctcaaaaaacgtttgaggcaactaagcaatatgtagtaagcacctaggagtagatcgcaagttcccaggaatattctagcctccgagaaatactaacaagccccagccactttttcaatagcatcatgccaagccctaaagatcgctttgaggccctcgtgtttaaagtgaagataatatttgccaagcggatacacaatctagataacgttcaggaggtttcagatacgctatgtaggctcggccccgtcattccatcatttacatttcacccgcatcctttgacaaccctgtaacgcgggcacacgtcaacaggccctggacgaagcggactcagtacatgggtacatccaggatctctacggtgtacgcggcagagctcagagggctcgttttggcgctacagatagcactcgacacaccgccaacgtataccctgccagataaatgcgtcgccatattcacggacaaccaagccgctatccaagccattcggaaccccaagcacccatcgggacaatacattttggtcgaggctattcaagtactcgaacagcttcgagaacaaggatggcaaatacagttccgatggattccagcacatgtcggcgtgccaggtaacgaggcaccctaccaagcagcgaaagcggccaccggaagcaatccaagcacgggagcgagcactgagcgaccgccagaagcggactctctgcggacactcacggcaaccaccaagtcaatcatccgtcggttgatgagagatgagtgggatacggcctgggagaatgccaagcacgggagagagctctttaggctcgaggtgaggccagggaaggcgatactcgacacgcacattggcatatacagagcgatcagctccgccatcacacagatgcgcacgggcaagattggcctacgtgcatacctccacgccatcaacaaggccgactccgaccaatgcgaatgcggccacgggccgcaaaccgtacggcacgtcctgcttgagtgccgggactgggcagacgaacgacatcaaatgtgggcaggcagggctccatgcagacatcaaacgcattctctgtagcccgtcaatggcagtataagcagcaaagatgctcttgaggactgggctgctgggacaattccgagcagtgccatccacggtactaaaatatatatagcgaagaagagtgatttaaattgtttatcttacttgtttgaccagacaagcctgtacaagcttgctgctcattcgatttatacaggttcgcagaagtataacaagctaagaaaaacacgttagcaggatcgtgagcgattggtagctcagggactcgtgaggttatacggacctgccatgttagcctaccgccttcagtgagtgcaatagtgatccctgtacagagagtggggtctattgccaatgggaggcgctatgtaaccgcttgtctcttgtcgccgatccgttcaagtagtcatatgcatatttcgtatgtaaagctgtaagccatgtcaccgaaggtgcctgaaatcccgtcccaattcctccactgacgtagctgctggtctagattgtaagttggtaaaagcaagaaattatatgcattagttttacatgatgtgtaaattgctttaatgaatgaggccatataagttagttactctttcgatctatgtaggttcgcagaaggaccgcaaataaggagataggccattgtgtgcgattggtaggcccaggctgcgtgagactgcacggtcctgtattattgacctactgtgcgaaccaatcaggtctgtctgccgtacgctgctcattttccgtcgccttgggtgatctggttgacaagaagttagtagacgggttgctaaaatatacgctgtcgggcttatgagcgtaagtcttagacagtcagggggcttcacaagcactagagagaagttgggaatcccctagtaagcagggtaaagaaaaaattaactggcttatattactgacatgaatcgttcgcgtataaatgaagtgggattaaactaaattaagtttagttttgcagcttattgtgagtgacttcctctagtagtagcgcttattggctcagtaagtatcagcctcgtctacttttaggtatgcagccgcctatcgacgtgttaatttaataataacgacgctctcgacctaatgatatataacagctttgaccccgcttgtcatataggagataagctgatctgtaacgtccactagggtaatccttactaatctagccattcgaattttaacctaacgggttagctgtaggtagcgtagccgctggcataagaaaaatttggaaagtcaccatgtgggaaaagtttatacagcccttacgctaatgcatagattctagatattcaagagccagtcaattactgattcatgaggtatttaagaataggtccagaggagcctcaatgctaacgcgtcaagggctataattgtctagcgtttatcatctgtgctctgggccacttagatctgtcaggcttaagaggggatcataggcatctcaatctcgacagagcgatgccacctaacccttccgtaaatagtaagcgagtatggagttcacccactataagtactccaaagccccaacctgtgaaatgatttcccagtacattcatgattatcttattgaccaagcagtcttcaatttacaacccagattcgacctaaaaactcacagtcaaagcttcaaaatggctactaggtatctccaacggttgagagatacaagaagtatccaagaagttccgataggaggggtacaattcgttacttttcaacaaaggcatgcaattggaacttctaggcttagatcttattccgctgttatcatagcctcgagatacaatgcaatactcgtatacataccaccacttccttctgtaacacaagttcctggtacaggtgacaacaatactcggttcataataaaccaagtacaagctcactacaataccaatcgaaattatttcccctcctcggaaacatgagtcatttacactgtctatcaaggccaagtggcattgccaagtcaagtgcaaattatgatgagttatcttcaggcaataggccttactccaactattaaatactatatagtacccgtgaatccgctcattccgggccagggaacggttgtggtcatgagtagagcgaacgggccttcgatatatcataatgatgctctgatttaggctgaatatactcttgagacgaaatattcaagatcattgtaatgggttgctgatcggcaatcaagttcataggagttttatcaagtatttggctctttttactataactacctctgattaccaaattcaaaatatataccgtacttcctagttttttttcagcctcgtgtagcatacgataagcagtgtagccgaacatagtgaagccatatgtattctgcagctcattctttagtaaatcatccccgcaaatatcctgaaacggatagccccacttcttattccttttgtattagctagaactaaataacaattgcgcgtgacttgttacatcgaccatgtaatacgggtatttaagcgatcgggtcgccctacttttccttaaatcctactggtaacctataaaatactcaaattctcttcatcctatatggatatccggcttcttctaaaagcagaacttactaaccatactaggttctcaattccttgtagaactgcagtaaacataattaaaaaattgcgttcaacgtgtaccgataataacttccaaggattttagaatgcaatgtactctaatagtctcgatatagtggaccttcatgatataataatagaagtaattcatctgggccgagtcgaattcgtttcactacttctctctcatggcttcccgataaagccttcttttactcgagaggcaatagtattcaaggtaaagcgcgttctcgaatgttttcttgaagctgggtaggacataaatgatccagttgatattctaatacctcctgtgctttggtaagttggctccactattcgaaaagccattccaataacaagagatctgttttcatagctatgcggtaacagacgtcgagatgaccagatggtttctagaacatggtacaaacccaaatacgtcgtgcgaggtagactgcaccccattgtcctatactattcgaaatgctcgtctaagtgtcatcaaattaatgctggaccatagaggagatgtgcgaaaaggacaacttcttcagtatgccgtttgtcgggacgaggggctggaagatataatctccctgctcgtcgaaagaggcgcgcctttaaatgcgacaatgtataaggatggccagactttgatacatttctatcccataagcctagggactgcgcttcacacggcaacagaacagggaaagatgaatgcaatccgccttttgaagcatctcggagcagacactgaggtgaaggacgcgaatggcgatactactttagaataggcacaaaaatggaataaaccagatatagtaaggcttttaagagacttggaagatcattcttaagcatattcgaaattgaagataggaataaattgagactagttacagcactatgatcaattttctagtttatccatattatcatttctattcacagtcctagatagggtgcctatcgtctatatcttgaagtcatcacccattcacatactaccagcggtaggaagaccaataatgccaaacgtaatctacgcttagtcccattttgagtaatataaaacgccttacgcggctcctgcagttgtatagaaattcagtcctccaacgcgtccttatacgacgaagagtcgtggaaggtaaatgatggcgttcatataaagcttccctggatacttgtattaaaatagatggccttagaggatgttgtggatgttgtatacagcggaaggtagacaggcgcaaacaacccccctaacgaccctaatagttcagcctctctcattcgtgtccctttggtctcccagatcgagagctggccttatagcgtaatttagttgaatagtggacttgaagggatgaaatatttcgacctaggaagtgagtcgtaatcttagaccatgacattgcctctttttccttcagccgcactagcagcgcattcttgtccgatgtgtacgtactgtgtttccctaggatgaccgccgtatagggtcgagacagcatcaggctagggtcgggtacaaaagtaaagaaatataccggcttcagatcagaattagattcgaccataaggagagcactcccacgtataccttggatagcaccaggacaataacatgaaacgggagtggaagagtccgaagggtcggaaagtagcctgattgaaggtttccgtttcttcctcttttaacacggctgttctgtgtcatagaaggtagtattcccatcttggtcgttgccagtgcctcgacttgagcggagttgtcaggaccccagtactaagaaggctgatacctgaggtattgtacctgttagggtgtgtagggaactgtagactacgtaggagctatatgtgctgcctatatagcccccttcttannnnnnnnnnnnnnnnnnnnnnnnnnnnnnnnnnnnnnnnnnnnnnnnnnnnnnnnnnnnnnnnnnnnnnnnnnnnnnnnnnnnnnnnnnnnnnnnnnnnnnnnnnnnnnnnnnnnnnnnnnnnnnnnnnnnnnnnnnnnnnnnnnnnnnnnnnnnnnnnnnnnnnnnnnnnnnnnnnnnnnnnnnnnnnnnnnnnnnnnnnnnnnnnnnnnnnnnnnnnnnnnnnnnnnnnnnnnnnnnnnnnnnnnnnnnnnnnnnnnnnnnnnnnnnnnnnnnnnnnnnnnnnnnnnnnnnnnnnnnnnnnnnnnnnnnnnnnnnnnnnnnnnnnnnnnnnnnnnnnnnnnnnnnnnnnnnnnnnnnnnnnnnnnnnnnnnnnnnnnnnnnnnnnnnnnnnnnnnnnnnnnnnnnnnnnnnnnnnnnnnnnnnnnnnnnnnnnnnnnnnnnnnnnnnnnnnnnnnnnnnnnnnnnnnnnnnnnnnnnnnnnnnnnnnnnnnnnnnnnnnnnnnnnnnnnnnnnnnnnnnnnnnnnnnnnnnnnnnnnnnnnnnnnnnnnnnnnnnnnnnnnnnnnnnnnnnnnnnnnnnnnnnnnnnnnnnnnnnnnnnnnnnnnnnnnnnnnnnnnnnnnnnnnnnnnnnnnnnnnnnnnnnnnnnnnnnnnnnnnnnnnnnnnnnnnnnnnnnnnnnnnnnnnnnnnnnnnnnnnnnnnnnnnnnnnnnnnnnnnnnnnnnnnnnnnnnnnnnnnnnnnnnnnnnnnnnnnnnnnnnnnnnnnnnnnnnnnnnnnnnnnnnnnnnnnnnnnnnnnnnnnnnnnnnnnnnnnnnnnnnnnnnnnnnnnnnnnnnnnnnnnnnnnnnnnnnnnnnnnnnnnnnnnnnnnnnnnnnnnnnnnnnnnnnnnnnnnnnnnnnnnnnnnnnnnnnnnnnnnnnnnnnnnnnnnnnnnnnnnnnnnnnnnnnnnnnnnnnnnnnnnnnnnnnnnnnnnnnnnnnnnnnnnnnnnnnnnnnnnnnnnnnnnnnnnnnnnnnnnnnnnnnnnnnnnnnnnnnnnnnnnnnnnnnnnnnnnnnnnnnnnnnnnnnnnnnnnnnnnnnnnnnnnnnnnnnnnnnnnnnnnnnnnnnnnnnnnnnnnnnnnnnnnnnnnnnnnnnnnnnnnnnnnnnnnnnnnnnnnnnnnnnnnnnnnnnnnnnnnnnnnnnnnnnnnnnnnnnnnnnnnnnnnnnnnnnnnnnnnnnnnnnnnnnnnnnnnnnnnnnnnnnnnnnnnnnnnnnnnnnnnnnnnnnnnnnnnnnnnnnnnnnnnnnnnnnnnnnnnnnnnnnnnnnnnnnnnnnnnnnnnnnnnnnnnnnnnnnnnnnnnnnnnnnnnnnnnnnnnnnnnnnnnnnnnnnnnnnnnnnnnnnnnnnnnnnnnnnnnnnnnnnnnnnnnnnnnnnnnnnnnnnnnnnnnnnnnnnnnnnnnnnnnnnnnnnnnnnnnnnnnnnnnnnnnnnnnnnnnnnnnnnnnnnnnnnnnnnnnnnnnnnnnnnnnnnnnnnnnnnnnnnnnnnnnnnnnnnnnnnnnnnnnnnnnnnnnnnnnnnnnnnnnnnnnnnnnnnnnnnnnnnnnnnnnnnnnnnnnnnnnnnnnnnnnnnnnnnnnnnnnnnnnnnnnnnnnnnnnnnnnnnnnnnnnnnnnnnnnnnnnnnnnnnnnnnnnnnnnnnnnnnnnnnnnnnnnnnnnnnnnnnnnnnnnnnnnnnnnnnnnnnnnnnnnnnnnnnnnnnnnnnnnnnnnnnnnnnnnnnnnnnnnnnnnnnnnnnnnnnnnnnnnnnnnnnnnnnnnnnnnnnnnnnnnnnnnnnnnnnnnnnnnnnnnnnnnnnnnnnnnnnnnnnnnnnnnnnnnnnnnnnnnnnnnnnnnnnnnnnnnnnnnnnnnnnnnnnnnnnnnnnnnnnnnnnnnnnnnnnnnnnnnnnnnnnnnnnnnnnnnnnnnnnnnnnnnnnnnnnnnnnnnnnnnnnnnnnnnnnnnnnnnnnnnnnnnnnnnnnnnnnnnnnnnnnnnnnnnnnnnnnnnnnnnnnnnnnnnnnnnnnnnnnnnnnnnnnnnnnnnnnnnnnnnnnnnnnnnnnnnnnnnnnnnnnnnnnnnnnnnnnnnnnnnnnnnnnnnnnnnnnnnnnnnnnnnnnnnnnnnnnnnnnnnnnnnnnnnnnnnnnnnnnnnnnnnnnnnnnnnnnnnnnnnnnnnnnnnnnnnnnnnnnnnnnnnnnnnnnnnnnnnnnnnnnnnnnnnnnnnnnnnnnnnnnnnnnnnnnnnnnnnnnnnnnnnnnnnnnnnnnnnnnnnnnnnnnnnnnnnnnnnnnnnnnnnnnnnnnnnnnnnnnnnnnnnnnnnnnnnnnnnnnnnnnnnnnnnnnnnnnnnnnnnnnnnnnnnnnnnnnnnnnnnnnnnnnnnnnnnnnnnnnnnnnnnnnnnnnnnnnnnnnnnnnnnnnnnnnnnnnnnnnnnnnnnnnnnnnnnnnnnnnnnnnnnnnnnnnnnnnnnnnnnnnnnnnnnnnnnnnnnnnnnnnnnnnnnnnnnnnnnnnnnnnnnnnnnnnnnnnnnnnnnnnnnnnnnnnnnnnnnnnnnnnnnnnnnnnnnnnnnnnnnnnnnnnnnnnnnnnnnnnnnnnnnnnnnnnnnnnnnnnnnnnnnnnnnnnnnnnnnnnnnnnnnnnnnnnnnnnnnnnnnnnnnnnnnnnnnnnnnnnnnnnnnnnnnnnnnnnnnnnnnnnnnnnnnnnnnnnnnnnnnnnnnnnnnnnnnnnnnnnnnnnnnnnnnnnnnnnnnnnnnnnnnnnnnnnnnnnnnnnnnnnnnnnnnnnnnnnnnnnnnnnnnnnnnnnnnnnnnnnnnnnnnnnnnnnnnnnnnnnnnnnnnnnnnnnnnnnnnnnnnnnnnnnnnnnnnnnnnnnnnnnnnnnnnnnnnnnnnnnnnnnnnnnnnnnnnnnnnnnnnnnnnnnnnnnnnnnnnnnnnnnnnnnnnnnnnnnnnnnnnnnnnnnnnnnnnnnnnnnnnnnnnnnnnnnnnnnnnnnnnnnnnnnnnnnnnnnnnnnnnnnnnnnnnnnnnnnnnnnnnnnnnnnnnnnnnnnnnnnnnnnnnnnnnnnnnnnnnnnnnnnnnnnnnnnnnnnnnnnnnnnnnnnnnnnnnnnnnnnnnnnnnnnnnnnnnnnnnnnnnnnnnnnnnnnnnnnnnnnnnnnnnnnnnnnnnnnnnnnnnnnnnnnnnnnnnnnnnnnnnnnnnnnnnnnnnnnnnnnnnnnnnnnnnnnnnnnnnnnnnnnnnnnnnnnnnnnnnnnnnnnnnnnnnnnnnnnnnnnnnnnnnnnnnnnnnnnnnnnnnnnnnnnnnnnnnnnnnnnnnnnnnnnnnnnnnnnnnnnnnnnnnnnnnnnnnnnnnnnnnnnnnnnnnnnnnnnnnnnnnnnnnnnnnnnnnnnnnnnnnnnnnnnnnnnnnnnnnnnnnnnnnnnnnnnnnnnnnnnnnnnnnnnnnnnnnnnnnnnnnnnnnnnnnnnnnnnnnnnnnnnnnnnnnnnnnnnnnnnnnnnnnnnnnnnnnnnnnnnnnnnnnnnnnnnnnnnnnnnnnnnnnnnnnnnnnnnnnnnnnnnnnnnnnnnnnnnnnnnnnnnnnnnnnnnnnnnnnnnnnnnnnnnnnnnnnnnnnnnnnnnnnnnnnnnnnnnnnnnnnnnnnnnnnnnnnnnnnnnnnnnnnnnnnnnnnnnnnnnnnnnnnnnnnnnnnnnnnnnnnnnnnnnnnnnnnnnnnnnnnnnnnnnnnnnnnnnnnnnnnnnnnnnnnnnnnnnnnnnnnnnnnnnnnnnnnnnnnnnnnnnnnnnnnnnnnnnnnnnnnnnnnnnnnnnnnnnnnnnnnnnnnnnnnnnnnnnnnnnnnnnnnnnnnnnnnnnnnnnnnnnnnnnnnnnnnnnnnnnnnnnnnnnnnnnnnnnnnnnnnnnnnnnnnnnnnnnnnnnnnnnnnnnnnnnnnnnnnnnnnnnnnnnnnnnnnnnnnnnnnnnnnnnnnnnnnnnnnnnnnnnnnnnnnnnnnnnnnnnnnnnnnnnnnnnnnnnnnnnnnnnnnnnnnnnnnnnnnnnnnnnnnnnnnnnnnnnnnnnnnnnnnnnnnnnnnnnnnnnnnnnnnnnnnnnnnnnnnnnnnnnnnnnnnnnnnnnnnnnnnnnnnnnnnnnnnnnnnnnnnnnnnnnnnnnnnnnnnnnnnnnnnnnnnnnnnnnnnnnnnnnnnnnnnnnnnnnnnnnnnnnnnnnnnnnnnnnnnnnnnnnnnnnnnnnnnnnnnnnnnnnnnnnnnnnnnnnnnnnnnnnnnnnnnnnnnnnnnnnnnnnnnnnnnnnnnnnnnnnnnnnnnnnnnnnnnnnnnnnnnnnnnnnnnnnnnnnnnnnnnnnnnnnnnnnnnnnnnnnnnnnnnnnnnnnnnnnnnnnnnnnnnnnnnnnnnnnnnnnnnnnnnnnnnnnnnnnnnnnnnnnnnnnnnnnnnnnnnnnnnnnnnnnnnnnnnnnnnnnnnnnnnnnnnnnnnnnnnnnnnnnnnnnnnnnnnnnnnnnnnnnnnnnnnnnnnnnnnnnnnnnnnnnnnnnnnnnnnnnnnnnnnnnnnnnnnnnnnnnnnnnnnnnnnnnnnnnnnnnnnnnnnnnnnnnnnnnnnnnnnnnnnnnnnnnnnnnnnnnnnnnnnnnnnnnnnnnnnnnnnnnnnnnnnnnnnnnnnnnnnnnnnnnnnnnnnnnnnnnnnnnnnnnnnnnnnnnnnnnnnnnnnnnnnnnnnnnnnnnnnnnnnnnnnnnnnnnnnnnnnnnnnnnnnnnnnnnnnnnnnnnnnnnnnnnnnnnnnnnnnnnnnnnnnnnnnnnnnnnnnnnnnnnnnnnnnnnnnnnnnnnnnnnnnnnnnnnnnnnnnnnnnnnnnnnnnnnnnnnnnnnnnnnnnnnnnnnnnnnnnnnnnnnnnnnnnnnnnnnnnnnnnnnnnnnnnnnnnnnnnnnnnnnnnnnnnnnnnnnnnnnnnnnnnnnnnnnnnnnnnnnnnnnnnnnnnnnnnnnnnnnnnnnnnnnnnnnnnnnnnnnnnnnnnnnnnnnnnnnnnnnnnnnnnnnnnnnnnnnnnnnnnnnnnnnnnnnnnnnnnnnnnnnnnnnnnnnnnnnnnnnnnnnnnnnnnnnnnnnnnnnnnnnnnnnnnnnnnnnnnnnnnnnnnnnnnnnnnnnnnnnnnnnnnnnnnnnnnnnnnnnnnnnnnnnnnnnnnnnnnnnnnnnnnnnnnnnnnnnnnnnnnnnnnnnnnnnnnnnnnnnnnnnnnnnnnnnnnnnnnnnnnnnnnnnnnnnnnnnnnnnnnnnnnnnnnnnnnnnnnnnnnnnnnnnnnnnnnnnnnnnnnnnnnnnnnnnnnnnnnnnnnnnnnnnnnnnnnnnnnnnnnnnnnnnnnnnnnnnnnnnnnnnnnnnnnnnnnnnnnnnnnnnnnnnnnnnnnnnnnnnnnnnnnnnnnnnnnnnnnnnnnnnnnnnnnnnnnnnnnnnnnnnnnnnnnnnnnnnnnnnnnnnnnnnnnnnnnnnnnnnnnnnnnnnnnnnnnnnnnnnnnnnnnnnnnnnnnnnnnnnnnnnnnnnnnnnnnnnnnnnnnnnnnnnnnnnnnnnnnnnnnnnnnnnnnnnnnnnnnnnnnnnnnnnnnnnnnnnnnnnnnnnnnnnnnnnnnnnnnnnnnnnnnnnnnnnnnnnnnnnnnnnnnnnnnnnnnnnnnnnnnnnnnnnnnnnnnnnnnnnnnnnnnnnnnnnnnnnnnnnnnnnnnnnnnnnnnnnnnnnnnnnnnnnnnnnnnnnnnnnnnnnnnnnnnnnnnnnnnnnnnnnnnnnnnnnnnnnnnnnnnnnnnnnnnnnnnnnnnnnnnnnnnnnnnnnnnnnnnnnnnnnnnnnnnnnnnnnnnnnnnnnnnnnnnnnnnnnnnnnnnnnnnnnnnnnnnnnnnnnnnnnnnnnnnnnnnnnnnnnnnnnnnnnnnnnnnnnnnnnnnnnnnnnnnnnnnnnnnnnnnnnnnnnnnnnnnnnnnnnnnnnnnnnnnnnnnnnnnnnnnnnnnnnnnnnnnnnnnnnnnnnnnnnnnnnnnnnnnnnnnnnnnnnnnnnnnnnnnnnnnnnnnnnnnnnnnnnnnnnnnnnnnnnnnnnnnnnnnnnnnnnnnnnnnnnnnnnnnnnnnnnnnnnnnnnnnnnnnnnnnnnnnnnnnnnnnnnnnnnnnnnnnnnnnnnnnnnnnnnnnnnnnnnnnnnnnnnnnnnnnnnnnnnnnnnnnnnnnnnnnnnnnnnnnnnnnnnnnnnnnnnnnnnnnnnnnnnnnnnnnnnnnnnnnnnnnnnnnnnnnnnnnnnnnnnnnnnnnnnnnnnnnnnnnnnnnnnnnnnnnnnnnnnnnnnnnnnnnnnnnnnnnnnnnnnnnnnnnnnnnnnnnnnnnnnnnnnnnnnnnnnnnnnnnnnnnnnnnnnnnnnnnnnnnnnnnnnnnnnnnnnnnnnnnnnnnnnnnnnnnnnnnnnnnnnnnnnnnnnnnnnnnnnnnnnnnnnnnnnnnnnnnnnnnnnnnnnnnnnnnnnnnnnnnnnnnnnnnnnnnnnnnnnnnnnnnnnnnnnnnnnnnnnnnnnnnnnnnnnnnnnnnnnnnnnnnnnnnnnnnnnnnnnnnnnnnnnnnnnnnnnnnnnnnnnnnnnnnnnnnnnnnnnnnnnnnnnnnnnnnnnnnnnnnnnnnnnnnnnnnnnnnnnnnnnnnnnnnnnnnnnnnnnnnnnnnnnnnnnnnnnnnnnnnnnnnnnnnnnnnnnnnnnnnnnnnnnnnnnnnnnnnnnnnnnnnnnnnnnnnnnnnnnnnnnnnnnnnnnnnnnnnnnnnnnnnnnnnnnnnnnnnnnnnnnnnnnnnnnnnnnnnnnnnnnnnnnnnnnnnnnnnnnnnnnnnnnnnnnnnnnnnnnnnnnnnnnnnnnnnnnnnnnnnnnnnnnnnnnnnnnnnnnnnnnnnnnnnnnnnnnnnnnnnnnnnnnnnnnnnnnnnnnnnnnnnnnnnnnnnnnnnnnnnnnnnnnnnnnnnnnnnnnnnnnnnnnnnnnnnnnnnnnnnnnnnnnnnnnnnnnnnnnnnnnnnnnnnnnnnnnnnnnnnnnnnnnnnnnnnnnnnnnnnnnnnnnnnnnnnnnnnnnnnnnnnnnnnnnnnnnnnnnnnnnnnnnnnnnnnnnnnnnnnnnnnnnnnnnnnnnnnnnnnnnnnnnnnnnnnnnnnnnnnnnnnnnnnnnnnnnnnnnnnnnnnnnnnnnnnnnnnnnnnnnnnnnnnnnnnnnnnnnnnnnnnnnnnnnnnnnnnnnnnnnnnnnnnnnnnnnnnnnnnnnnnnnnnnnnnnnnnnnnnnnnnnnnnnnnnnnnnnnnnnnnnnnnnnnnnnnnnnnnnnnnnnnnnnnnnnnnnnnnnnnnnnnnnnnnnnnnnnnnnnnnnnnnnnnnnnnnnnnnnnnnnnnnnnnnnnnnnnnnnnnnnnnnnnnnnnnnnnnnnnnnnnnnnnnnnnnnnnnnnnnnnnnnnnnnnnnnnnnnnnnnnnnnnnnnnnnnnnnnnnnnnnnnnnnnnnnnnnnnnnnnnnnnnnnnnnnnnnnnnnnnnnnnnnnnnnnnnnnnnnnnnnnnnnnnnnnnnnnnnnnnnnnnnnnnnnnnnnnnnnnnnnnnnnnnnnnnnnnnnnnnnnnnnnnnnnnnnnnnnnnnnnnnnnnnnnnnnnnnnnnnnnnnnnnnnnnnnnnnnnnnnnnnnnnnnnnnnnnnnnnnnnnnnnnnnnnnnnnnnnnnnnnnnnnnnnnnnnnnnnnnnnnnnnnnnnnnnnnnnnnnnnnnnnnnnnnnnnnnnnnnnnnnnnnnnnnnnnnnnnnnnnnnnnnnnnnnnnnnnnnnnnnnnnnnnnnnnnnnnnnnnnnnnnnnnnnnnnnnnnnnnnnnnnnnnnnnnnnnnnnnnnnnnnnnnnnnnnnnnnnnnnnnnnnnnnnnnnnnnnnnnnnnnnnnnnnnnnnnnnnnnnnnnnnnnnnnnnnnnnnnnnnnnnnnnnnnnnnnnnnnnnnnnnnnnnnnnnnnnnnnnnnnnnnnnnnnnnnnnnnnnnnnnnnnnnnnnnnnnnnnnnnnnnnnnnnnnnnnnnnnnnnnnnnnnnnnnnnnnnnnnnnnnnnnnnnnnnnnnnnnnnnnnnnnnnnnnnnnnnnnnnnnnnnnnnnnnnnnnnnnnnnnnnnnnnnnnnnnnnnnnnnnnnnnnnnnnnnnnnnnnnnnnnnnnnnnnnnnnnnnnnnnnnnnnnnnnnnnnnnnnnnnnnnnnnnnnnnnnnnnnnnnnnnnnnnnnnnnnnnnnnnnnnnnnnnnnnnnnnnnnnnnnnnnnnnnnnnnnnnnnnnnnnnnnnnnnnnnnnnnnnnnnnnnnnnnnnnnnnnnnnnnnnnnnnnnnnnnnnnnnnnnnnnnnnnnnnnnnnnnnnnnnnnnnnnnnnnnnnnnnnnnnnnnnnnnnnnnnnnnnnnnnnnnnnnnnnnnnnnnnnnnnnnnnnnnnnnnnnnnnnnnnnnnnnnnnnnnnnnnnnnnnnnnnnnnnnnnnnnnnnnnnnnnnnnnnnnnnnnnnnnnnnnnnnnnnnnnnnnnnnnnnnnnnnnnnnnnnnnnnnnnnnnnnnnnnnnnnnnnnnnnnnnnnnnnnnnnnnnnnnnnnnnnnnnnnnnnnnnnnnnnnnnnnnnnnnnnnnnnnnnnnnnnnnnnnnnnnnnnnnnnnnnnnnnnnnnnnnnnnnnnnnnnnnnnnnnnnnnnnnnnnnnnnnnnnnnnnnnnnnnnnnnnnnnnnnnnnnnnnnnnnnnnnnnnnnnnnnnnnnnnnnnnnnnnnnnnnnnnnnnnnnnnnnnnnnnnnnnnnnnnnnnnnnnnnnnnnnnnnnnnnnnnnnnnnnnnnnnnnnnnnnnnnnnnnnnnnnnnnnnnnnnnnnnnnnnnnnnnnnnnnnnnnnnnnnnnnnnnnnnnnnnnnnnnnnnnnnnnnnnnnnnnnnnnnnnnnnnnnnnnnnnnnnnnnnnnnnnnnnnnnnnnnnnnnnnnnnnnnnnnnnnnnnnnnnnnnnnnnnnnnnnnnnnnnnnnnnnnnnnnnnnnnnnnnnnnnnnnnnnnnnnnnnnnnnnnnnnnnnnnnnnnnnnnnnnnnnnnnnnnnnnnnnnnnnnnnnnnnnnnnnnnnnnnnnnnnnnnnnnnnnnnnnnnnnnnnnnnnnnnnnnnnnnnnnnnnnnnnnnnnnnnnnnnnnnnnnnnnnnnnnnnnnnnnnnnnnnnnnnnnnnnnnnnnnnnnnnnnnnnnnnnnnnnnnnnnnnnnnnnnnnnnnnnnnnnnnnnnnnnnnnnnnnnnnnnnnnnnnnnnnnnnnnnnnnnnnnnnnnnnnnnnnnnnnnnnnnnnnnnnnnnnnnnnnnnnnnnnnnnnnnnnnnnnnnnnnnnnnnnnnnnnnnnnnnnnnnnnnnnnnnnnnnnnnnnnnnnnnnnnnnnnnnnnnnnnnnnnnnnnnnnnnnnnnnnnnnnnnnnnnnnnnnnnnnnnnnnnnnnnnnnnnnnnnnnnnnnnnnnnnnnnnnnnnnnnnnnnnnnnnnnnnnnnnnnnnnnnnnnnnnnnnnnnnnnnnnnnnnnnnnnnnnnnnnnnnnnnnnnnnnnnnnnnnnnnnnnnnnnnnnnnnnnnnnnnnnnnnnnnnnnnnnnnnnnnnnnnnnnnnnnnnnnnnnnnnnnnnnnnnnnnnnnnnnnnnnnnnnnnnnnnnnnnnnnnnnnnnnnnnnnnnnnnnnnnnnnnnnnnnnnnnnnnnnnnnnnnnnnnnnnnnnnnnnnnnnnnnnnnnnnnnnnnnnnnnnnnnnnnnnnnnnnnnnnnnnnnnnnnnnnnnnnnnnnnnnnnnnnnnnnnnnnnnnnnnnnnnnnnnnnnnnnnnnnnnnnnnnnnnnnnnnnnnnnnnnnnnnnnnnnnnnnnnnnnnnnnnnnnnnnnnnnnnnnnnnnnnnnnnnnnnnnnnnnnnnnnnnnnnnnnnnnnnnnnnnnnnnnnnnnnnnnnnnnnnnnnnnnnnnnnnnnnnnnnnnnnnnnnnnnnnnnnnnnnnnnnnnnnnnnnnnnnnnnnnnnnnnnnnnnnnnnnnnnnnnnnnnnnnnnnnnnnnnnnnnnnnnnnnnnnnnnnnnnnnnnnnnnnnnnnnnnnnnnnnnnnnnnnnnnnnnnnnnnnnnnnnnnnnnnnnnnnnnnnnnnnnnnnnnnnnnnnnnnnnnnnnnnnnnnnnnnnnnnnnnnnnnnnnnnnnnnnnnnnnnnnnnnnnnnnnnnnnnnnnnnnnnnnnnnnnnnnnnnnnnnnnnnnnnnnnnnnnnnnnnnnnnnnnnnnnnnnnnnnnnnnnnnnnnnnnnnnnnnnnnnnnnnnnnnnnnnnnnnnnnnnnnnnnnnnnnnnnnnnnnnnnnnnnnnnnnnnnnnnnnnnnnnnnnnnnnnnnnnnnnnnnnnnnnnnnnnnnnnnnnnnnnnnnnnnnnnnnnnnnnnnnnnnnnnnnnnnnnnnnnnnnnnnnnnnnnnnnnnnnnnnnnnnnnnnnnnnnnnnnnnnnnnnnnnnnnnnnnnnnnnnnnnnnnnnnnnnnnnnnnnnnnnnnnnnnnnnnnnnnnnnnnnnnnnnnnnnnnnnnnnnnnnnnnnnnnnnnnnnnnnnnnnnnnnnnnnnnnnnnnnnnnnnnnnnnnnnnnnnnnnnnnnnnnnnnnnnnnnnnnnnnnnnnnnnnnnnnnnnnnnnnnnnnnnnnnnnnnnnnnnnnnnnnnnnnnnnnnnnnnnnnnnnnnnnnnnnnnnnnnnnnnnnnnnnnnnnnnnnnnnnnnnnnnnnnnnnnnnnnnnnnnnnnnnnnnnnnnnnnnnnnnnnnnnnnnnnnnnnnnnnnnnnnnnnnnnnnnnnnnnnnnnnnnnnnnnnnnnnnnnnnnnnnnnnnnnnnnnnnnnnnnnnnnnnnnnnnnnnnnnnnnnnnnnnnnnnnnnnnnnnnnnnnnnnnnnnnnnnnnnnnnnnnnnnnnnnnnnnnnnnnnnnnnnnnnnnnnnnnnnnnnnnnnnnnnnnnnnnnnnnnnnnnnnnnnnnnnnnnnnnnnnnnnnnnnnnnnnnnnnnnnnnnnnnnnnnnnnnnnnnnnnnnnnnnnnnnnnnnnnnnnnnnnnnnnnnnnnnnnnnnnnnnnnnnnnnnnnnnnnnnnnnnnnnnnnnnnnnnnnnnnnnnnnnnnnnnnnnnnnnnnnnnnnnnnnnnnnnnnnnnnnnnnnnnnnnnnnnnnnnnnnnnnnnnnnnnnnnnnnnnnnnnnnnnnnnnnnnnnnnnnnnnnnnnnnnnnnnnnnnnnnnnnnnnnnnnnnnnnnnnnnnnnnnnnnnnnnnnnnnnnnnnnnnnnnnnnnnnnnnnnnnnnnnnnnnnnnnnnnnnnnnnnnnnnnnnnnnnnnnnnnnnnnnnnnnnnnnnnnnnnnnnnnnnnnnnnnnnnnnnnnnnnnnnnnnnnnnnnnnnnnnnnnnnnnnnnnnnnnnnnnnnnnnnnnnnnnnnnnnnnnnnnnnnnnnnnnnnnnnnnnnnnnnnnnnnnnnnnnnnnnnnnnnnnnnnnnnnnnnnnnnnnnnnnnnnnnnnnnnnnnnnnnnnnnnnnnnnnnnnnnnnnnnnnnnnnnnnnnnnnnnnnnnnnnnnnnnnnnnnnnnnnnnnnnnnnnnnnnnnnnnnnnnnnnnnnnnnnnnnnnnnnnnnnnnnnnnnnnnnnnnnnnnnnnnnnnnnnnnnnnnnnnnnnnnnnnnnnnnnnnnnnnnnnnnnnnnnnnnnnnnnnnnnnnnnnnnnnnnnnnnnnnnnnnnnnnnnnnnnnnnnnnnnnnnnnnnnnnnnnnnnnnnnnnnnnnnnnnnnnnnnnnnnnnnnnnnnnnnnnnnnnnnnnnnnnnnnnnnnnnnnnnnnnnnnnnnnnnnnnnnnnnnnnnnnnnnnnnnnnnnnnnnnnnnnnnnnnnnnnnnnnnnnnnnnnnnnnnnnnnnnnnnnnnnnnnnnnnnnnnnnnnnnnnnnnnnnnnnnnnnnnnnnnnnnnnnnnnnnnnnnnnnnnnnnnnnnnnnnnnnnnnnnnnnnnnnnnnnnnnnnnnnnnnnnnnnnnnnnnnnnnnnnnnnnnnnnnnnnnnnnnnnnnnnnnnnnnnnnnnnnnnnnnnnnnnnnnnnnnnnnnnnnnnnnnnnnnnnnnnnnnnnnnnnnnnnnnnnnnnnnnnnnnnnnnnnnnnnnnnnnnnnnnnnnnnnnnnnnnnnnnnnnnnnnnnnnnnnnnnnnnnnnnnnnnnnnnnnnnnnnnnnnnnnnnnnnnnnnnnnnnnnnnnnnnnnnnnnnnnnnnnnnnnnnnnnnnnnnnnnnnnnnnnnnnnnnnnnnnnnnnnnnnnnnnnnnnnnnnnnnnnnnnnnnnnnnnnnnnnnnnnnnnnnnnnnnnnnnnnnnnnnnnnnnnnnnnnnnnnnnnnnnnnnnnnnnnnnnnnnnnnnnnnnnnnnnnnnnnnnnnnnnnnnnnnnnnnnnnnnnnnnnnnnnnnnnnnnnnnnnnnnnnnnnnnnnnnnnnnnnnnnnnnnnnnnnnnnnnnnnnnnnnnnnnnnnnnnnnnnnnnnnnnnnnnnnnnnnnnnnnnnnnnnnnnnnnnnnnnnnnnnnnnnnnnnnnnnnnnnnnnnnnnnnnnnnnnnnnnnnnnnnnnnnnnnnnnnnnnnnnnnnnnnnnnnnnnnnnnnnnnnnnnnnnnnnnnnnnnnnnnnnnnnnnnnnnnnnnnnnnnnnnnnnnnnnnnnnnnnnnnnnnnnnnnnnnnnnnnnnnnnnnnnnnnnnnnnnnnnnnnnnnnnnnnnnnnnnnnnnnnnnnnnnnnnnnnnnnnnnnnnnnnnnnnnnnnnnnnnnnnnnnnnnnnnnnnnnnnnnnnnnnnnnnnnnnnnnnnnnnnnnnnnnnnnnnnnnnnnnnnnnnnnnnnnnnnnnnnnnnnnnnnnnnnnnnnnnnnnnnnnnnnnnnnnnnnnnnnnnnnnnnnnnnnnnnnnnnnnnnnnnnnnnnnnnnnnnnnnnnnnnnnnnnnnnnnnnnnnnnnnnnnnnnnnnnnnnnnnnnnnnnnnnnnnnnnnnnnnnnnnnnnnnnnnnnnnnnnnnnnnnnnnnnnnnnnnnnnnnnnnnnnnnnnnnnnnnnnnnnnnnnnnnnnnnnnnnnnnnnnnnnnnnnnnnnnnnnnnnnnnnnnnnnnnnnnnnnnnnnnnnnnnnnnnnnnnnnnnnnnnnnnnnnnnnnnnnnnnnnnnnnnnnnnnnnnnnnnnnnnnnnnnnnnnnnnnnnnnnnnnnnnnnnnnnnnnnnnnnnnnnnnnnnnnnnnnnnnnnnnnnnnnnnnnnnnnnnnnnnnnnnnnnnnnnnnnnnnnnnnnnnnnnnnnnnnnnnnnnnnnnnnnnnnnnnnnnnnnnnnnnnnnnnnnnnnnnnnnnnnnnnnnnnnnnnnnnnnnnnnnnnnnnnnnnnnnnnnnnnnnnnnnnnnnnnnnnnnnnnnnnnnnnnnnnnnnnnnnnnnnnnnnnnnnnnnnnnnnnnnnnnnnnnnnnnnnnnnnnnnnnnnnnnnnnnnnnnnnnnnnnnnnnnnnnnnnnnnnnnnnnnnnnnnnnnnnnnnnnnnnnnnnnnnnnnnnnnnnnnnnnnnnnnnnnnnnnnnnnnnnnnnnnnnnnnnnnnnnnnnnnnnnnnnnnnnnnnnnnnnnnnnnnnnnnnnnnnnnnnnnnnnnnnnnnnnnnnnnnnnnnnnnnnnnnnnnnnnnnnnnnnnnnnnnnnnnnnnnnnnnnnnnnnnnnnnnnnnnnnnnnnnnnnnnnnnnnnnnnnnnnnnnnnnnnnnnnnnnnnnnnnnnnnnnnnnnnnnnnnnnnnnnnnnnnnnnnnnnnnnnnnnnnnnnnnnnnnnnnnnnnnnnnnnnnnnnnnnnnnnnnnnnnnnnnnnnnnnnnnnnnnnnnnnnnnnnnnnnnnnnnnnnnnnnnnnnnnnnnnnnnnnnnnnnnnnnnnnnnnnnnnnnnnnnnnnnnnnnnnnnnnnnnnnnnnnnnnnnnnnnnnnnnnnnnnnnnnnnnnnnnnnnnnnnnnnnnnnnnnnnnnnnnnnnnnnnnnnnnnnnnnnnnnnnnnnnnnnnnnnnnnnnnnnnnnnnnnnnnnnnnnnnnnnnnnnnnnnnnnnnnnnnnnnnnnnnnnnnnnnnnnnnnnnnnnnnnnnnnnnnnnnnnnnnnnnnnnnnnnnnnnnnnnnnnnnnnnnnnnnnnnnnnnnnnnnnnnnnnnnnnnnnnnnnnnnnnnnnnnnnnnnnnnnnnnnnnnnnnnnnnnnnnnnnnnnnnnnnnnnnnnnnnnnnnnnnnnnnnnnnnnnnnnnnnnnnnnnnnnnnnnnnnnnnnnnnnnnnnnnnnnnnnnnnnnnnnnnnnnnnnnnnnnnnnnnnnnnnnnnnnnnnnnnnnnnnnnnnnnnnnnnnnnnnnnnnnnnnnnnnnnnnnnnnnnnnnnnnnnnnnnnnnnnnnnnnnnnnnnnnnnnnnnnnnnnnnnnnnnnnnnnnnnnnnnnnnnnnnnnnnnnnnnnnnnnnnnnnnnnnnnnnnnnnnnnnnnnnnnnnnnnnnnnnnnnnnnnnnnnnnnnnnnnnnnnnnnnnnnnnnnnnnnnnnnnnnnnnnnnnnnnnnnnnnnnnnnnnnnnnnnnnnnnnnnnnnnnnnnnnnnnnnnnnnnnnnnnnnnnnnnnnnnnnnnnnnnnnnnnnnnnnnnnnnnnnnnnnnnnnnnnnnnnnnnnnnnnnnnnnnnnnnnnnnnnnnnnnnnnnnnnnnnnnnnnnnnnnnnnnnnnnnnnnnnnnnnnnnnnnnnnnnnnnnnnnnnnnnnnnnnnnnnnnnnnnnnnnnnnnnnnnnnnnnnnnnnnnnnnnnnnnnnnnnnnnnnnnnnnnnnnnnnnnnnnnnnnnnnnnnnnnnnnnnnnnnnnnnnnnnnnnnnnnnnnnnnnnnnnnnnnnnnnnnnnnnnnnnnnnnnnnnnnnnnnnnnnnnnnnnnnnnnnnnnnnnnnnnnnnnnnnnnnnnnnnnnnnnnnnnnnnnnnnnnnnnnnnnnnnnnnnnnnnnnnnnnnnnnnnnnnnnnnnnnnnnnnnnnnnnnnnnnnnnnnnnnnnnnnnnnnnnnnnnnnnnnnnnnnnnnnnnnnnnnnnnnnnnnnnnnnnnnnnnnnnnnnnnnnnnnnnnnnnnnnnnnnnnnnnnnnnnnnnnnnnnnnnnnnnnnnnnnnnnnnnnnnnnnnnnnnnnnnnnnnnnnnnnnnnnnnnnnnnnnnnnnnnnnnnnnnnnnnnnnnnnnnnnnnnnnnnnnnnnnnnnnnnnnnnnnnnnnnnnnnnnnnnnnnnnnnnnnnnnnnnnnnnnnnnnnnnnnnnnnnnnnnnnnnnnnnnnnnnnnnnnnnnnnnnnnnnnnnnnnnnnnnnnnnnnnnnnnnnnnnnnnnnnnnnnnnnnnnnnnnnnnnnnnnnnnnnnnnnnnnnnnnnnnnnnnnnnnnnnnnnnnnnnnnnnnnnnnnnnnnnnnnnnnnnnnnnnnnnnnnnnnnnnnnnnnnnnnnnnnnnnnnnnnnnnnnnnnnnnnnnnnnnnnnnnnnnnnnnnnnnnnnnnnnnnnnnnnnnnnnnnnnnnnnnnnnnnnnnnnnnnnnnnnnnnnnnnnnnnnnnnnnnnnnnnnnnnnnnnnnnnnnnnnnnnnnnnnnnnnnnnnnnnnnnnnnnnnnnnnnnnnnnnnnnnnnnnnnnnnnnnnnnnnnnnnnnnnnnnnnnnnnnnnnnnnnnnnnnnnnnnnnnnnnnnnnnnnnnnnnnnnnnnnnnnnnnnnnnnnnnnnnnnnnnnnnnnnnnnnnnnnnnnnnnnnnnnnnnnnnnnnnnnnnnnnnnnnnnnnnnnnnnnnnnnnnnnnnnnnnnnnnnnnnnnnnnnnnnnnnnnnnnnnnnnnnnnnnnnnnnnnnnnnnnnnnnnnnnnnnnnnnnnnnnnnnnnnnnnnnnnnnnnnnnnnnnnnnnnnnnnnnnnnnnnnnnnnnnnnnnnnnnnnnnnnnnnnnnnnnnnnnnnnnnnnnnnnnnnnnnnnnnnnnnnnnnnnnnnnnnnnnnnnnnnnnnnnnnnnnnnnnnnnnnnnnnnnnnnnnnnnnnnnnnnnnnnnnnnnnnnnnnnnnnnnnnnnnnnnnnnnnnnnnnnnnnnnnnnnnnnnnnnnnnnnnnnnnnnnnnnnnnnnnnnnnnnnnnnnnnnnnnnnnnnnnnnnnnnnnnnnnnnnnnnnnnnnnnnnnnnnnnnnnnnnnnnnnnnnnnnnnnnnnnnnnnnnnnnnnnnnnnnnnnnnnnnnnnnnnnnnnnnnnnnnnnnnnnnnnnnnnnnnnnnnnnnnnnnnnnnnnnnnnnnnnnnnnnnnnnnnnnnnnnnnnnnnnnnnnnnnnnnnnnnnnnnnnnnnnnnnnnnnnnnnnnnnnnnnnnnnnnnnnnnnnnnnnnnnnnnnnnnnnnnnnnnnnnnnnnnnnnnnnnnnnnnnnnnnnnnnnnnnnnnnnnnnnnnnnnnnnnnnnnnnnnnnnnnnnnnnnnnnnnnnnnnnnnnnnnnnnnnnnnnnnnnnnnnnnnnnnnnnnnnnnnnnnnnnnnnnnnnnnnnnnnnnnnnnnnnnnnnnnnnnnnnnnnnnnnnnnnnnnnnnnnnnnnnnnnnnnnnnnnnnnnnnnnnnnnnnnnnnnnnnnnnnnnnnnnnnnnnnnnnnnnnnnnnnnnnnnnnnnnnnnnnnnnnnnnnnnnnnnnnnnnnnnnnnnnnnnnnnnnnnnnnnnnnnnnnnnnnnnnnnnnnnnnnnnnnnnnnnnnnnnnnnnnnnnnnnnnnnnnnnnnnnnnnnnnnnnnnnnnnnnnnnnnnnnnnnnnnnnnnnnnnnnnnnnnnnnnnnnnnnnnnnnnnnnnnnnnnnnnnnnnnnnnnnnnnnnnnnnnnnnnnnnnnnnnnnnnnnnnnnnnnnnnnnnnnnnnnnnnnnnnnnnnnnnnnnnnnnnnnnnnnnnnnnnnnnnnnnnnnnnnnnnnnnnnnnnnnnnnnnnnnnnnnnnnnnnnnnnnnnnnnnnnnnnnnnnnnnnnnnnnnnnnnnnnnnnnnnnnnnnnnnnnnnnnnnnnnnnnnnnnnnnnnnnnnnnnnnnnnnnnnnnnnnnnnnnnnnnnnnnnnnnnnnnnnnnnnnnnnnnnnnnnnnnnnnnnnnnnnnnnnnnnnnnnnnnnnnnnnnnnnnnnnnnnnnnnnnnnnnnnnnnnnnnnnnnnnnnnnnnnnnnnnnnnnnnnnnnnnnnnnnnnnnnnnnnnnnnnnnnnnnnnnnnnnnnnnnnnnnnnnnnnnnnnnnnnnnnnnnnnnnnnnnnnnnnnnnnnnnnnnnnnnnnnnnnnnnnnnnnnnnnnnnnnnnnnnnnnnnnnnnnnnnnnnnnnnnnnnnnnnnnnnnnnnnnnnnnnnnnnnnnnnnnnnnnnnnnnnnnnnnnnnnnnnnnnnnnnnnnnnnnnnnnnnnnnnnnnnnnnnnnnnnnnnnnnnnnnnnnnnnnnnnnnnnnnnnnnnnnnnnnnnnnnnnnnnnnnnnnnnnnnnnnnnnnnnnnnnnnnnnnnnnnnnnnnnnnnnnnnnnnnnnnnnnnnnnnnnnnnnnnnnnnnnnnnnnnnnnnnnnnnnnnnnnnnnnnnnnnnnnnnnnnnnnnnnnnnnnnnnnnnnnnnnnnnnnnnnnnnnnnnnnnnnnnnnnnnnnnnnnnnnnnnnnnnnnnnnnnnnnnnnnnnnnnnnnnnnnnnnnnnnnnnnnnnnnnnnnnnnnnnnnnnnnnnnnnnnnnnnnnnnnnnnnnnnnnnnnnnnnnnnnnnnnnnnnnnnnnnnnnnnnnnnnnnnnnnnnnnnnnnnnnnnnnnnnnnnnnnnnnnnnnnnnnnnnnnnnnnnnnnnnnnnnnnnnnnnnnnnnnnnnnnnnnnnnnnnnnnnnnnnnnnnnnnnnnnnnnnnnnnnnnnnnnnnnnnnnnnnnnnnnnnnnnnnnnnnnnnnnnnnnnnnnnnnnnnnnnnnnnnnnnnnnnnnnnnnnnnnnnnnnnnnnnnnnnnnnnnnnnnnnnnnnnnnnnnnnnnnnnnnnnnnnnnnnnnnnnnnnnnnnnnnnnnnnnnnnnnnnnnnnnnnnnnnnnnnnnnnnnnnnnnnnnnnnnnnnnnnnnnnnnnnnnnnnnnnnnnnnnnnnnnnnnnnnnnnnnnnnnnnnnnnnnnnnnnnnnnnnnnnnnnnnnnnnnnnnnnnnnnnnnnnnnnnnnnnnnnnnnnnnnnnnnnnnnnnnnnnnnnnnnnnnnnnnnnnnnnnnnnnnnnnnnnnnnnnnnnnnnnnnnnnnnnnnnnnnnnnnnnnnnnnnnnnnnnnnnnnnnnnnnnnnnnnnnnnnnnnnnnnnnnnnnnnnnnnnnnnnnnnnnnnnnnnnnnnnnnnnnnnnnnnnnnnnnnnnnnnnnnnnnnnnnnnnnnnnnnnnnnnnnnnnnnnnnnnnnnnnnnnnnnnnnnnnnnnnnnnnnnnnnnnnnnnnnnnnnnnnnnnnnnnnnnnnnnnnnnnnnnnnnnnnnnnnnnnnnnnnnnnnnnnnnnnnnnnnnnnnnnnnnnnnnnnnnnnnnnnnnnnnnnnnnnnnnnnnnnnnnnnnnnnnnnnnnnnnnnnnnnnnnnnnnnnnnnnnnnnnnnnnnnnnnnnnnnnnnnnnnnnnnnnnnnnnnnnnnnnnnnnnnnnnnnnnnnnnnnnnnnnnnnnnnnnnnnnnnnnnnnnnnnnnnnnnnnnnnnnnnnnnnnnnnnnnnnnnnnnnnnnnnnnnnnnnnnnnnnnnnnnnnnnnnnnnnnnnnnnnnnnnnnnnnnnnnnnnnnnnnnnnnnnnnnnnnnnnnnnnnnnnnnnnnnnnnnnnnnnnnnnnnnnnnnnnnnnnnnnnnnnnnnnnnnnnnnnnnnnnnnnnnnnnnnnnnnnnnnnnnnnnnnnnnnnnnnnnnnnnnnnnnnnnnnnnnnnnnnnnnnnnnnnnnnnnnnnnnnnnnnnnnnnnnnnnnnnnnnnnnnnnnnnnnnnnnnnnnnnnnnnnnnnnnnnnnnnnnnnnnnnnnnnnnnnnnnnnnnnnnnnnnnnnnnnnnnnnnnnnnnnnnnnnnnnnnnnnnnnnnnnnnnnnnnnnnnnnnnnnnnnnnnnnnnnnnnnnnnnnnnnnnnnnnnnnnnnnnnnnnnnnnnnnnnnnnnnnnnnnnnnnnnnnnnnnnnnnnnnnnnnnnnnnnnnnnnnnnnnnnnnnnnnnnnnnnnnnnnnnnnnnnnnnnnnnnnnnnnnnnnnnnnnnnnnnnnnnnnnnnnnnnnnnnnnnnnnnnnnnnnnnnnnnnnnnnnnnnnnnnnnnnnnnnnnnnnnnnnnnnnnnnnnnnnnnnnnnnnnnnnnnnnnnnnnnnnnnnnnnnnnnnnnnnnnnnnnnnnnnnnnnnnnnnnnnnnnnnnnnnnnnnnnnnnnnnnnnnnnnnnnnnnnnnnnnnnnnnnnnnnnnnnnnnnnnnnnnnnnnnnnnnnnnnnnnnnnnnnnnnnnnnnnnnnnnnnnnnnnnnnnnnnnnnnnnnnnnnnnnnnnnnnnnnnnnnnnnnnnnnnnnnnnnnnnnnnnnnnnnnnnnnnnnnnnnnnnnnnnnnnnnnnnnnnnnnnnnnnnnnnnnnnnnnnnnnnnnnnnnnnnnnnnnnnnnnnnnnnnnnnnnnnnnnnnnnnnnnnnnnnnnnnnnnnnnnnnnnnnnnnnnnnnnnnnnnnnnnnnnnnnnnnnnnnnnnnnnnnnnnnnnnnnnnnnnnnnnnnnnnnnnnnnnnnnnnnnnnnnnnnnnnnnnnnnnnnnnnnnnnnnnnnnnnnnnnnnnnnnnnnnnnnnnnnnnnnnnnnnnnnnnnnnnnnnnnnnnnnnnnnnnnnnnnnnnnnnnnnnnnnnnnnnnnnnnnnnnnnnnnnnnnnnnnnnnnnnnnnnnnnnnnnnnnnnnnnnnnnnnnnnnnnnnnnnnnnnnnnnnnnnnnnnnnnnnnnnnnnnnnnnnnnnnnnnnnnnnnnnnnnnnnnnnnnnnnnnnnnnnnnnnnnnnnnnnnnnnnnnnnnnnnnnnnnnnnnnnnnnnnnnnnnnnnnnnnnnnnnnnnnnnnnnnnnnnnnnnnnnnnnnnnnnnnnnnnnnnnnnnnnnnnnnnnnnnnnnnnnnnnnnnnnnnnnnnnnnnnnnnnnnnnnnnnnnnnnnnnnnnnnnnnnnnnnnnnnnnnnnnnnnnnnnnnnnnnnnnnnnnnnnnnnnnnnnnnnnnnnnnnnnnnnnnnnnnnnnnnnnnnnnnnnnnnnnnnnnnnnnnnnnnnnnnnnnnnnnnnnnnnnnnnnnnnnnnnnnnnnnnnnnnnnnnnnnnnnnnnnnnnnnnnnnnnnnnnnnnnnnnnnnnnnnnnnnnnnnnnnnnnnnnnnnnnnnnnnnnnnnnnnnnnnnnnnnnnnnnnnnnnnnnnnnnnnnnnnnnnnnnnnnnnnnnnnnnnnnnnnnnnnnnnnnnnnnnnnnnnnnnnnnnnnnnnnnnnnnnnnnnnnnnnnnnnnnnnnnnnnnnnnnnnnnnnnnnnnnnnnnnnnnnnnnnnnnnnnnnnnnnnnnnnnnnnnnnnnnnnnnnnnnnnnnnnnnnnnnnnnnnnnnnnnnnnnnnnnnnnnnnnnnnnnnnnnnnnnnnnnnnnnnnnnnnnnnnnnnnnnnnnnnnnnnnnnnnnnnnnnnnnnnnnnnnnnnnnnnnnnnnnnnnnnnnnnnnnnnnnnnnnnnnnnnnnnnnnnnnnnnnnnnnnnnnnnnnnnnnnnnnnnnnnnnnnnnnnnnnnnnnnnnnnnnnnnnnnnnnnnnnnnnnnnnnnnnnnnnnnnnnnnnnnnnnnnnnnnnnnnnnnnnnnnnnnnnnnnnnnnnnnnnnnnnnnnnnnnnnnnnnnnnnnnnnnnnnnnnnnnnnnnnnnnnnnnnnnnnnnnnnnnnnnnnnnnnnnnnnnnnnnnnnnnnnnnnnnnnnnnnnnnnnnnnnnnnnnnnnnnnnnnnnnnnnnnnnnnnnnnnnnnnnnnnnnnnnnnnnnnnnnnnnnnnnnnnnnnnnnnnnnnnnnnnnnnnnnnnnnnnnnnnnnnnnnnnnnnnnnnnnnnnnnnnnnnnnnnnnnnnnnnnnnnnnnnnnnnnnnnnnnnnnnnnnnnnnnnnnnnnnnnnnnnnnnnnnnnnnnnnnnnnnnnnnnnnnnnnnnnnnnnnnnnnnnnnnnnnnnnnnnnnnnnnnnnnnnnnnnnnnnnnnnnnnnnnnnnnnnnnnnnnnnnnnnnnnnnnnnnnnnnnnnnnnnnnnnnnnnnnnnnnnnnnnnnnnnnnnnnnnnnnnnnnnnnnnnnnnnnnnnnnnnnnnnnnnnnnnnnnnnnnnnnnnnnnnnnnnnnnnnnnnnnnnnnnnnnnnnnnnnnnnnnnnnnnnnnnnnnnnnnnnnnnnnnnnnnnnnnnnnnnnnnnnnnnnnnnnnnnnnnnnnnnnnnnnnnnnnnnnnnnnnnnnnnnnnnnnnnnnnnnnnnnnnnnnnnnnnnnnnnnnnnnnnnnnnnnnnnnnnnnnnnnnnnnnnnnnnnnnnnnnnnnnnnnnnnnnnnnnnnnnnnnnnnnnnnnnnnnnnnnnnnnnnnnnnnnnnnnnnnnnnnnnnnnnnnnnnnnnnnnnnnnnnnnnnnnnnnnnnnnnnnnnnnnnnnnnnnnnnnnnnnnnnnnnnnnnnnnnnnnnnnnnnnnnnnnnnnnnnnnnnnnnnnnnnnnnnnnnnnnnnnnnnnnnnnnnnnnnnnnnnnnnnnnnnnnnnnnnnnnnnnnnnnnnnnnnnnnnnnnnnnnnnnnnnnnnnnnnnnnnnnnnnnnnnnnnnnnnnnnnnnnnnnnnnnnnnnnnnnnnnnnnnnnnnnnnnnnnnnnnnnnnnnnnnnnnnnnnnnnnnnnnnnnnnnnnnnnnnnnnnnnnnnnnnnnnnnnnnnnnnnnnnnnnnnnnnnnnnnnnnnnnnnnnnnnnnnnnnnnnnnnnnnnnnnnnnnnnnnnnnnnnnnnnnnnnnnnnnnnnnnnnnnnnnnnnnnnnnnnnnnnnnnnnnnnnnnnnnnnnnnnnnnnnnnnnnnnnnnnnnnnnnnnnnnnnnnnnnnnnnnnnnnnnnnnnnnnnnnnnnnnnnnnnnnnnnnnnnnnnnnnnnnnnnnnnnnnnnnnnnnnnnnnnnnnnnnnnnnnnnnnnnnnnnnnnnnnnnnnnnnnnnnnnnnnnnnnnnnnnnnnnnnnnnnnnnnnnnnnnnnnnnnnnnnnnnnnnnnnnnnnnnnnnnnnnnnnnnnnnnnnnnnnnnnnnnnnnnnnnnnnnnnnnnnnnnnnnnnnnnnnnnnnnnnnnnnnnnnnnnnnnnnnnnnnnnnnnnnnnnnnnnnnnnnnnnnnnnnnnnnnnnnnnnnnnnnnnnnnnnnnnnnnnnnnnnnnnnnnnnnnnnnnnnnnnnnnnnnnnnnnnnnnnnnnnnnnnnnnnnnnnnnnnnnnnnnnnnnnnnnnnnnnnnnnnnnnnnnnnnnnnnnnnnnnnnnnnnnnnnnnnnnnnnnnnnnnnnnnnnnnnnnnnnnnnnnnnnnnnnnnnnnnnnnnnnnnnnnnnnnnnnnnnnnnnnnnnnnnnnnnnnnnnnnnnnnnnnnnnnnnnnnnnnnnnnnnnnnnnnnnnnnnnnnnnnnnnnnnnnnnnnnnnnnnnnnnnnnnnnnnnnnnnnnnnnnnnnnnnnnnnnnnnnnnnnnnnnnnnnnnnnnnnnnnnnnnnnnnnnnnnnnnnnnnnnnnnnnnnnnnnnnnnnnnnnnnnnnnnnnnnnnnnnnnnnnnnnnnnnnnnnnnnnnnnnnnnnnnnnnnnnnnnnnnnnnnnnnnnnnnnnnnnnnnnnnnnnnnnnnnnnnnnnnnnnnnnnnnnnnnnnnnnnnnnnnnnnnnnnnnnnnnnnnnnnnnnnnnnnnnnnnnnnnnnnnnnnnnnnnnnnnnnnnnnnnnnnnnnnnnnnnnnnnnnnnnnnnnnnnnnnnnnnnnnnnnnnnnnnnnnnnnnnnnnnnnnnnnnnnnnnnnnnnnnnnnnnnnnnnnnnnnnnnnnnnnnnnnnnnnnnnnnnnnnnnnnnnnnnnnnnnnnnnnnnnnnnnnnnnnnnnnnnnnnnnnnnnnnnnnnnnnnnnnnnnnnnnnnnnnnnnnnnnnnnnnnnnnnnnnnnnnnnnnnnnnnnnnnnnnnnnnnnnnnnnnnnnnnnnnnnnnnnnnnnnnnnnnnnnnnnnnnnnnnnnnnnnnnnnnnnnnnnnnnnnnnnnnnnnnnnnnnnnnnnnnnnnnnnnnnnnnnnnnnnnnnnnnnnnnnnnnnnnnnnnnnnnnnnnnnnnnnnnnnnnnnnnnnnnnnnnnnnnnnnnnnnnnnnnnnnnnnnnnnnnnnnnnnnnnnnnnnnnnnnnnnnnnnnnnnnnnnnnnnnnnnnnnnnnnnnnnnnnnnnnnnnnnnnnnnnnnnnnnnnnnnnnnnnnnnnnnnnnnnnnnnnnnnnnnnnnnnnnnnnnnnnnnnnnnnnnnnnnnnnnnnnnnnnnnnnnnnnnnnnnnnnnnnnnnnnnnnnnnnnnnnnnnnnnnnnnnnnnnnnnnnnnnnnnnnnnnnnnnnnnnnnnnnnnnnnnnnnnnnnnnnnnnnnnnnnnnnnnnnnnnnnnnnnnnnnnnnnnnnnnnnnnnnnnnnnnnnnnnnnnnnnnnnnnnnnnnnnnnnnnnnnnnnnnnnnnnnnnnnnnnnnnnnnnnnnnnnnnnnnnnnnnnnnnnnnnnnnnnnnnnnnnnnnnnnnnnnnnnnnnnnnnnnnnnnnnnnnnnnnnnnnnnnnnnnnnnnnnnnnnnnnnnnnnnnnnnnnnnnnnnnnnnnnnnnnnnnnnnnnnnnnnnnnnnnnnnnnnnnnnnnnnnnnnnnnnnnnnnnnnnnnnnnnnnnnnnnnnnnnnnnnnnnnnnnnnnnnnnnnnnnnnnnnnnnnnnnnnnnnnnnnnnnnnnnnnnnnnnnnnnnnnnnnnnnnnnnnnnnnnnnnnnnnnnnnnnnnnnnnnnnnnnnnnnnnnnnnnnnnnnnnnnnnnnnnnnnnnnnnnnnnnnnnnnnnnnnnnnnnnnnnnnnnnnnnnnnnnnnnnnnnnnnnnnnnnnnnnnnnnnnnnnnnnnnnnnnnnnnnnnnnnnnnnnnnnnnnnnnnnnnnnnnnnnnnnnnnnnnnnnnnnnnnnnnnnnnnnnnnnnnnnnnnnnnnnnnnnnnnnnnnnnnnnnnnnnnnnnnnnnnnnnnnnnnnnnnnnnnnnnnnnnnnnnnnnnnnnnnnnnnnnnnnnnnnnnnnnnnnnnnnnnnnnnnnnnnnnnnnnnnnnnnnnnnnnnnnnnnnnnnnnnnnnnnnnnnnnnnnnnnnnnnnnnnnnnnnnnnnnnnnnnnnnnnnnnnnnnnnnnnnnnnnnnnnnnnnnnnnnnnnnnnnnnnnnnnnnnnnnnnnnnnnnnnnnnnnnnnnnnnnnnnnnnnnnnnnnnnnnnnnnnnnnnnnnnnnnnnnnnnnnnnnnnnnnnnnnnnnnnnnnnnnnnnnnnnnnnnnnnnnnnnnnnnnnnnnnnnnnnnnnnnnnnnnnnnnnnnnnnnnnnnnnnnnnnnnnnnnnnnnnnnnnnnnnnnnnnnnnnnnnnnnnnnnnnnnnnnnnnnnnnnnnnnnnnnnnnnnnnnnnnnnnnnnnnnnnnnnnnnnnnnnnnnnnnnnnnnnnnnnnnnnnnnnnnnnnnnnnnnnnnnnnnnnnnnnnnnnnnnnnnnnnnnnnnnnnnnnnnnnnnnnnnnnnnnnnnnnnnnnnnnnnnnnnnnnnnnnnnnnnnnnnnnnnnnnnnnnnnnnnnnnnnnnnnnnnnnnnnnnnnnnnnnnnnnnnnnnnnnnnnnnnnnnnnnnnnnnnnnnnnnnnnnnnnnnnnnnnnnnnnnnnnnnnnnnnnnnnnnnnnnnnnnnnnnnnnnnnnnnnnnnnnnnnnnnnnnnnnnnnnnnnnnnnnnnnnnnnnnnnnnnnnnnnnnnnnnnnnnnnnnnnnnnnnnnnnnnnnnnnnnnnnnnnnnnnnnnnnnnnnnnnnnnnnnnnnnnnnnnnnnnnnnnnnnnnnnnnnnnnnnnnnnnnnnnnnnnnnnnnnnnnnnnnnnnnnnnnnnnnnnnnnnnnnnnnnnnnnnnnnnnnnnnnnnnnnnnnnnnnnnnnnnnnnnnnnnnnnnnnnnnnnnnnnnnnnnnnnnnnnnnnnnnnnnnnnnnnnnnnnnnnnnnnnnnnnnnnnnnnnnnnnnnnnnnnnnnnnnnnnnnnnnnnnnnnnnnnnnnnnnnnnnnnnnnnnnnnnnnnnnnnnnnnnnnnnnnnnnnnnnnnnnnnnnnnnnnnnnnnnnnnnnnnnnnnnnnnnnnnnnnnnnnnnnnnnnnnnnnnnnnnnnnnnnnnnnnnnnnnnnnnnnnnnnnnnnnnnnnnnnnnnnnnnnnnnnnnnnnnnnnnnnnnnnnnnnnnnnnnnnnnnnnnnnnnnnnnnnnnnnnnnnnnnnnnnnnnnnnnnnnnnnnnnnnnnnnnnnnnnnnnnnnnnnnnnnnnnnnnnnnnnnnnnnnnnnnnnnnnnnnnnnnnnnnnnnnnnnnnnnnnnnnnnnnnnnnnnnnnnnnnnnnnnnnnnnnnnnnnnnnnnnnnnnnnnnnnnnnnnnnnnnnnnnnnnnnnnnnnnnnnnnnnnnnnnnnnnnnnnnnnnnnnnnnnnnnnnnnnnnnnnnnnnnnnnnnnnnnnnnnnnnnnnnnnnnnnnnnnnnnnnnnnnnnnnnnnnnnnnnnnnnnnnnnnnnnnnnnnnnnnnnnnnnnnnnnnnnnnnnnnnnnnnnnnnnnnnnnnnnnnnnnnnnnnnnnnnnnnnnnnnnnnnnnnnnnnnnnnnnnnnnnnnnnnnnnnnnnnnnnnnnnnnnnnnnnnnnnnnnnnnnnnnnnnnnnnnnnnnnnnnnnnnnnnnnnnnnnnnnnnnnnnnnnnnnnnnnnnnnnnnnnnnnnnnnnnnnnnnnnnnnnnnnnnnnnnnnnnnnnnnnnnnnnnnnnnnnnnnnnnnnnnnnnnnnnnnnnnnnnnnnnnnnnnnnnnnnnnnnnnnnnnnnnnnnnnnnnnnnnnnnnnnnnnnnnnnnnnnnnnnnnnnnnnnnnnnnnnnnnnnnnnnnnnnnnnnnnnnnnnnnnnnnnnnnnnnnnnnnnnnnnnnnnnnnnnnnnnnnnnnnnnnnnnnnnnnnnnnnnnnnnnnnnnnnnnnnnnnnnnnnnnnnnnnnnnnnnnnnnnnnnnnnnnnnnnnnnnnnnnnnnnnnnnnnnnnnnnnnnnnnnnnnnnnnnnnnnnnnnnnnnnnnnnnnnnnnnnnnnnnnnnnnnnnnnnnnnnnnnnnnnnnnnnnnnnnnnnnnnnnnnnnnnnnnnnnnnnnnnnnnnnnnnnnnnnnnnnnnnnnnnnnnnnnnnnnnnnnnnnnnnnnnnnnnnnnnnnnnnnnnnnnnnnnnnnnnnnnnnnnnnnnnnnnnnnnnnnnnnnnnnnnnnnnnnnnnnnnnnnnnnnnnnnnnnnnnnnnnnnnnnnnnnnnnnnnnnnnnnnnnnnnnnnnnnnnnnnnnnnnnnnnnnnnnnnnnnnnnnnnnnnnnnnnnnnnnnnnnnnnnnnnnnnnnnnnnnnnnnnnnnnnnnnnnnnnnnnnnnnnnnnnnnnnnnnnnnnnnnnnnnnnnnnnnnnnnnnnnnnnnnnnnnnnnnnnnnnnnnnnnnnnnnnnnnnnnnnnnnnnnnnnnnnnnnnnnnnnnnnnnnnnnnnnnnnnnnnnnnnnnnnnnnnnnnnnnnnnnnnnnnnnnnnnnnnnnnnnnnnnnnnnnnnnnnnnnnnnnnnnnnnnnnnnnnnnnnnnnnnnnnnnnnnnnnnnnnnnnnnnnnnnnnnnnnnnnnnnnnnnnnnnnnnnnnnnnnnnnnnnnnnnnnnnnnnnnnnnnnnnnnnnnnnnnnnnnnnnnnnnnnnnnnnnnnnnnnnnnnnnnnnnnnnnnnnnnnnnnnnnnnnnnnnnnnnnnnnnnnnnnnnnnnnnnnnnnnnnnnnnnnnnnnnnnnnnnnnnnnnnnnnnnnnnnnnnnnnnnnnnnnnnnnnnnnnnnnnnnnnnnnnnnnnnnnnnnnnnnnnnnnnnnnnnnnnnnnnnnnnnnnnnnnnnnnnnnnnnnnnnnnnnnnnnnnnnnnnnnnnnnnnnnnnnnnnnnnnnnnnnnnnnnnnnnnnnnnnnnnnnnnnnnnnnnnnnnnnnnnnnnnnnnnnnnnnnnnnnnnnnnnnnnnnnnnnnnnnnnnnnnnnnnnnnnnnnnnnnnnnnnnnnnnnnnnnnnnnnnnnnnnnnnnnnnnnnnnnnnnnnnnnnnnnnnnnnnnnnnnnnnnnnnnnnnnnnnnnnnnnnnnnnnnnnnnnnnnnnnnnnnnnnnnnnnnnnnnnnnnnnnnnnnnnnnnnnnnnnnnnnnnnnnnnnnnnnnnnnnnnnnnnnnnnnnnnnnnnnnnnnnnnnnnnnnnnnnnnnnnnnnnnnnnnnnnnnnnnnnnnnnnnnnnnnnnnnnnnnnnnnnnnnnnnnnnnnnnnnnnnnnnnnnnnnnnnnnnnnnnnnnnnnnnnnnnnnnnnnnnnnnnnnnnnnnnnnnnnnnnnnnnnnnnnnnnnnnnnnnnnnnnnnnnnnnnnnnnnnnnnnnnnnnnnnnnnnnnnnnnnnnnnnnnnnnnnnnnnnnnnnnnnnnnnnnnnnnnnnnnnnnnnnnnnnnnnnnnnnnnnnnnnnnnnnnnnnnnnnnnnnnnnnnnnnnnnnnnnnnnnnnnnnnnnnnnnnnnnnnnnnnnnnnnnnnnnnnnnnnnnnnnnnnnnnnnnnnnnnnnnnnnnnnnnnnnnnnnnnnnnnnnnnnnnnnnnnnnnnnnnnnnnnnnnnnnnnnnnnnnnnnnnnnnnnnnnnnnnnnnnnnnnnnnnnnnnnnnnnnnnnnnnnnnnnnnnnnnnnnnnnnnnnnnnnnnnnnnnnnnnnnnnnnnnnnnnnnnnnnnnnnnnnnnnnnnnnnnnnnnnnnnnnnnnnnnnnnnnnnnnnnnnnnnnnnnnnnnnnnnnnnnnnnnnnnnnnnnnnnnnnnnnnnnnnnnnnnnnnnnnnnnnnnnnnnnnnnnnnnnnnnnnnnnnnnnnnnnnnnnnnnnnnnnnnnnnnnnnnnnnnnnnnnnnnnnnnnnnnnnnnnnnnnnnnnnnnnnnnnnnnnnnnnnnnnnnnnnnnnnnnnnnnnnnnnnnnnnnnnnnnnnnnnnnnnnnnnnnnnnnnnnnnnnnnnnnnnnnnnnnnnnnnnnnnnnnnnnnnnnnnnnnnnnnnnnnnnnnnnnnnnnnnnnnnnnnnnnnnnnnnnnnnnnnnnnnnnnnnnnnnnnnnnnnnnnnnnnnnnnnnnnnnnnnnnnnnnnnnnnnnnnnnnnnnnnnnnnnnnnnnnnnnnnnnnnnnnnnnnnnnnnnnnnnnnnnnnnnnnnnnnnnnnnnnnnnnnnnnnnnnnnnnnnnnnnnnnnnnnnnnnnnnnnnnnnnnnnnnnnnnnnnnnnnnnnnnnnnnnnnnnnnnnnnnnnnnnnnnnnnnnnnnnnnnnnnnnnnnnnnnnnnnnnnnnnnnnnnnnnnnnnnnnnnnnnnnnnnnnnnnnnnnnnnnnnnnnnnnnnnnnnnnnnnnnnnnnnnnnnnnnnnnnnnnnnnnnnnnnnnnnnnnnnnnnnnnnnnnnnnnnnnnnnnnnnnnnnnnnnnnnnnnnnnnnnnnnnnnnnnnnnnnnnnnnnnnnnnnnnnnnnnnnnnnnnnnnnnnnnnnnnnnnnnnnnnnnnnnnnnnnnnnnnnnnnnnnnnnnnnnnnnnnnnnnnnnnnnnnnnnnnnnnnnnnnnnnnnnnnnnnnnnnnnnnnnnnnnnnnnnnnnnnnnnnnnnnnnnnnnnnnnnnnnnnnnnnnnnnnnnnnnnnnnnnnnnnnnnnnnnnnnnnnnnnnnnnnnnnnnnnnnnnnnnnnnnnnnnnnnnnnnnnnnnnnnnnnnnnnnnnnnnnnnnnnnnnnnnnnnnnnnnnnnnnnnnnnnnnnnnnnnnnnnnnnnnnnnnnnnnnnnnnnnnnnnnnnnnnnnnnnnnnnnnnnnnnnnnnnnnnnnnnnnnnnnnnnnnnnnnnnnnnnnnnnnnnnnnnnnnnnnnnnnnnnnnnnnnnnnnnnnnnnnnnnnnnnnnnnnnnnnnnnnnnnnnnnnnnnnnnnnnnnnnnnnnnnnnnnnnnnnnnnnnnnnnnnnnnnnnnnnnnnnnnnnnnnnnnnnnnnnnnnnnnnnnnnnnnnnnnnnnnnnnnnnnnnnnnnnnnnnnnnnnnnnnnnnnnnnnnnnnnnnnnnnnnnnnnnnnnnnnnnnnnnnnnnnnnnnnnnnnnnnnnnnnnnnnnnnnnnnnnnnnnnnnnnnnnnnnnnnnnnnnnnnnnnnnnnnnnnnnnnnnnnnnnnnnnnnnnnnnnnnnnnnnnnnnnnnnnnnnnnnnnnnnnnnnnnnnnnnnnnnnnnnnnnnnnnnnnnnnnnnnnnnnnnnnnnnnnnnnnnnnnnnnnnnnnnnnnnnnnnnnnnnnnnnnnnnnnnnnnnnnnnnnnnnnnnnnnnnnnnnnnnnnnnnnnnnnnnnnnnnnnnnnnnnnnnnnnnnnnnnnnnnnnnnnnnnnnnnnnnnnnnnnnnnnnnnnnnnnnnnnnnnnnnnnnnnnnnnnnnnnnnnnnnnnnnnnnnnnnnnnnnnnnnnnnnnnnnnnnnnnnnnnnnnnnnnnnnnnnnnnnnnnnnnnnnnnnnnnnnnnnnnnnnnnnnnnnnnnnnnnnnnnnnnnnnnnnnnnnnnnnnnnnnnnnnnnnnnnnnnnnnnnnnnnnnnnnnnnnnnnnnnnnnnnnnnnnnnnnnnnnnnnnnnnnnnnnnnnnnnnnnnnnnnnnnnnnnnnnnnnnnnnnnnnnnnnnnnnnnnnnnnnnnnnnnnnnnnnnnnnnnnnnnnnnnnnnnnnnnnnnnnnnnnnnnnnnnnnnnnnnnnnnnnnnnnnnnnnnnnnnnnnnnnnnnnnnnnnnnnnnnnnnnnnnnnnnnnnnnnnnnnnnnnnnnnnnnnnnnnnnnnnnnnnnnnnnnnnnnnnnnnnnnnnnnnnnnnnnnnnnnnnnnnnnnnnnnnnnnnnnnnnnnnnnnnnnnnnnnnnnnnnnnnnnnnnnnnnnnnnnnnnnnnnnnnnnnnnnnnnnnnnnnnnnnnnnnnnnnnnnnnnnnnnnnnnnnnnnnnnnnnnnnnnnnnnnnnnnnnnnnnnnnnnnnnnnnnnnnnnnnnnnnnnnnnnnnnnnnnnnnnnnnnnnnnnnnnnnnnnnnnnnnnnnnnnnnnnnnnnnnnnnnnnnnnnnnnnnnnnnnnnnnnnnnnnnnnnnnnnnnnnnnnnnnnnnnnnnnnnnnnnnnnnnnnnnnnnnnnnnnnnnnnnnnnnnnnnnnnnnnnnnnnnnnnnnnnnnnnnnnnnnnnnnnnnnnnnnnnnnnnnnnnnnnnnnnnnnnnnnnnnnnnnnnnnnnnnnnnnnnnnnnnnnnnnnnnnnnnnnnnnnnnnnnnnnnnnnnnnnnnnnnnnnnnnnnnnnnnnnnnnnnnnnnnnnnnnnnnnnnnnnnnnnnnnnnnnnnnnnnnnnnnnnnnnnnnnnnnnnnnnnnnnnnnnnnnnnnnnnnnnnnnnnnnnnnnnnnnnnnnnnnnnnnnnnnnnnnnnnnnnnnnnnnnnnnnnnnnnnnnnnnnnnnnnnnnnnnnnnnnnnnnnnnnnnnnnnnnnnnnnnnnnnnnnnnnnnnnnnnnnnnnnnnnnnnnnnnnnnnnnnnnnnnnnnnnnnnnnnnnnnnnnnnnnnnnnnnnnnnnnnnnnnnnnnnnnnnnnnnnnnnnnnnnnnnnnnnnnnnnnnnnnnnnnnnnnnnnnnnnnnnnnnnnnnnnnnnnnnnnnnnnnnnnnnnnnnnnnnnnnnnnnnnnnnnnnnnnnnnnnnnnnnnnnnnnnnnnnnnnnnnnnnnnnnnnnnnnnnnnnnnnnnnnnnnnnnnnnnnnnnnnnnnnnnnnnnnnnnnnnnnnnnnnnnnnnnnnnnnnnnnnnnnnnnnnnnnnnnnnnnnnnnnnnnnnnnnnnnnnnnnnnnnnnnnnnnnnnnnnnnnnnnnnnnnnnnnnnnnnnnnnnnnnnnnnnnnnnnnnnnnnnnnnnnnnnnnnnnnnnnnnnnnnnnnnnnnnnnnnnnnnnnnnnnnnnnnnnnnnnnnnnnnnnnnnnnnnnnnnnnnnnnnnnnnnnnnnnnnnnnnnnnnnnnnnnnnnnnnnnnnnnnnnnnnnnnnnnnnnnnnnnnnnnnnnnnnnnnnnnnnnnnnnnnnnnnnnnnnnnnnnnnnnnnnnnnnnnnnnnnnnnnnnnnnnnnnnnnnnnnnnnnnnnnnnnnnnnnnnnnnnnnnnnnnnnnnnnnnnnnnnnnnnnnnnnnnnnnnnnnnnnnnnnnnnnnnnnnnnnnnnnnnnnnnnnnnnnnnnnnnnnnnnnnnnnnnnnnnnnnnnnnnnnnnnnnnnnnnnnnnnnnnnnnnnnnnnnnnnnnnnnnnnnnnnnnnnnnnnnnnnnnnnnnnnnnnnnnnnnnnnnnnnnnnnnnnnnnnnnnnnnnnnnnnnnnnnnnnnnnnnnnnnnnnnnnnnnnnnnnnnnnnnnnnnnnnnnnnnnnnnnnnnnnnnnnnnnnnnnnnnnnnnnnnnnnnnnnnnnnnnnnnnnnnnnnnnnnnnnnnnnnnnnnnnnnnnnnnnnnnnnnnnnnnnnnnnnnnnnnnnnnnnnnnnnnnnnnnnnnnnnnnnnnnnnnnnnnnnnnnnnnnnnnnnnnnnnnnnnnnnnnnnnnnnnnnnnnnnnnnnnnnnnnnnnnnnnnnnnnnnnnnnnnnnnnnnnnnnnnnnnnnnnnnnnnnnnnnnnnnnnnnnnnnnnnnnnnnnnnnnnnnnnnnnnnnnnnnnnnnnnnnnnnnnnnnnnnnnnnnnnnnnnnnnnnnnnnnnnnnnnnnnnnnnnnnnnnnnnnnnnnnnnnnnnnnnnnnnnnnnnnnnnnnnnnnnnnnnnnnnnnnnnnnnnnnnnnnnnnnnnnnnnnnnnnnnnnnnnnnnnnnnnnnnnnnnnnnnnnnnnnnnnnnnnnnnnnnnnnnnnnnnnnnnnnnnnnnnnnnnnnnnnnnnnnnnnnnnnnnnnnnnnnnnnnnnnnnnnnnnnnnnnnnnnnnnnnnnnnnnnnnnnnnnnnnnnnnnnnnnnnnnnnnnnnnnnnnnnnnnnnnnnnnnnnnnnnnnnnnnnnnnnnnnnnnnnnnnnnnnnnnnnnnnnnnnnnnnnnnnnnnnnnnnnnnnnnnnnnnnnnnnnnnnnnnnnnnnnnnnnnnnnnnnnnnnnnnnnnnnnnnnnnnnnnnnnnnnnnnnnnnnnnnnnnnnnnnnnnnnnnnnnnnnnnnnnnnnnnnnnnnnnnnnnnnnnnnnnnnnnnnnnnnnnnnnnnnnnnnnnnnnnnnnnnnnnnnnnnnnnnnnnnnnnnnnnnnnnnnnnnnnnnnnnnnnnnnnnnnnnnnnnnnnnnnnnnnnnnnnnnnnnnnnnnnnnnnnnnnnnnnnnnnnnnnnnnnnnnnnnnnnnnnnnnnnnnnnnnnnnnnnnnnnnnnnnnnnnnnnnnnnnnnnnnnnnnnnnnnnnnnnnnnnnnnnnnnnnnnnnnnnnnnnnnnnnnnnnnnnnnnnnnnnnnnnnnnnnnnnnnnnnnnnnnnnnnnnnnnnnnnnnnnnnnnnnnnnnnnnnnnnnnnnnnnnnnnnnnnnnnnnnnnnnnnnnnnnnnnnnnnnnnnnnnnnnnnnnnnnnnnnnnnnnnnnnnnnnnnnnnnnnnnnnnnnnnnnnnnnnnnnnnnnnnnnnnnnnnnnnnnnnnnnnnnnnnnnnnnnnnnnnnnnnnnnnnnnnnnnnnnnnnnnnnnnnnnnnnnnnnnnnnnnnnnnnnnnnnnnnnnnnnnnnnnnnnnnnnnnnnnnnnnnnnnnnnnnnnnnnnnnnnnnnnnnnnnnnnnnnnnnnnnnnnnnnnnnnnnnnnnnnnnnnnnnnnnnnnnnnnnnnnnnnnnnnnnnnnnnnnnnnnnnnnnnnnnnnnnnnnnnnnnnnnnnnnnnnnnnnnnnnnnnnnnnnnnnnnnnnnnnnnnnnnnnnnnnnnnnnnnnnnnnnnnnnnnnnnnnnnnnnnnnnnnnnnnnnnnnnnnnnnnnnnnnnnnnnnnnnnnnnnnnnnnnnnnnnnnnnnnnnnnnnnnnnnnnnnnnnnnnnnnnnnnnnnnnnnnnnnnnnnnnnnnnnnnnnnnnnnnnnnnnnnnnnnnnnnnnnnnnnnnnnnnnnnnnnnnnnnnnnnnnnnnnnnnnnnnnnnnnnnnnnnnnnnnnnnnnnnnnnnnnnnnnnnnnnnnnnnnnnnnnnnnnnnnnnnnnnnnnnnnnnnnnnnnnnnnnnnnnnnnnnnnnnnnnnnnnnnnnnnnnnnnnnnnnnnnnnnnnnnnnnnnnnnnnnnnnnnnnnnnnnnnnnnnnnnnnnnnnnnnnnnnnnnnnnnnnnnnnnnnnnnnnnnnnnnnnnnnnnnnnnnnnnnnnnnnnnnnnnnnnnnnnnnnnnnnnnnnnnnnnnnnnnnnnnnnnnnnnnnnnnnnnnnnnnnnnnnnnnnnnnnnnnnnnnnnnnnnnnnnnnnnnnnnnnnnnnnnnnnnnnnnnnnnnnnnnnnnnnnnnnnnnnnnnnnnnnnnnnnnnnnnnnnnnnnnnnnnnnnnnnnnnnnnnnnnnnnnnnnnnnnnnnnnnnnnnnnnnnnnnnnnnnnnnnnnnnnnnnnnnnnnnnnnnnnnnnnnnnnnnnnnnnnnnnnnnnnnnnnnnnnnnnnnnnnnnnnnnnnnnnnnnnnnnnnnnnnnnnnnnnnnnnnnnnnnnnnnnnnnnnnnnnnnnnnnnnnnnnnnnnnnnnnnnnnnnnnnnnnnnnnnnnnnnnnnnnnnnnnnnnnnnnnnnnnnnnnnnnnnnnnnnnnnnnnnnnnnnnnnnnnnnnnnnnnnnnnnnnnnnnnnnnnnnnnnnnnnnnnnnnnnnnnnnnnnnnnnnnnnnnnnnnnnnnnnnnnnnnnnnnnnnnnnnnnnnnnnnnnnnnnnnnnnnnnnnnnnnnnnnnnnnnnnnnnnnnnnnnnnnnnnnnnnnnnnnnnnnnnnnnnnnnnnnnnnnnnnnnnnnnnnnnnnnnnnnnnnnnnnnnnnnnnnnnnnnnnnnnnnnnnnnnnnnnnnnnnnnnnnnnnnnnnnnnnnnnnnnnnnnnnnnnnnnnnnnnnnnnnnnnnnnnnnnnnnnnnnnnnnnnnnnnnnnnnnnnnnnnnnnnnnnnnnnnnnnnnnnnnnnnnnnnnnnnnnnnnnnnnnnnnnnnnnnnnnnnnnnnnnnnnnnnnnnnnnnnnnnnnnnnnnnnnnnnnnnnnnnnnnnnnnnnnnnnnnnnnnnnnnnnnnnnnnnnnnnnnnnnnnnnnnnnnnnnnnnnnnnnnnnnnnnnnnnnnnnnnnnnnnnnnnnnnnnnnnnnnnnnnnnnnnnnnnnnnnnnnnnnnnnnnnnnnnnnnnnnnnnnnnnnnnnnnnnnnnnnnnnnnnnnnnnnnnnnnnnnnnnnnnnnnnnnnnnnnnnnnnnnnnnnnnnnnnnnnnnnnnnnnnnnnnnnnnnnnnnnnnnnnnnnnnnnnnnnnnnnnnnnnnnnnnnnnnnnnnnnnnnnnnnnnnnnnnnnnnnnnnnnnnnnnnnnnnnnnnnnnnnnnnnnnnnnnnnnnnnnnnnnnnnnnnnnnnnnnnnnnnnnnnnnnnnnnnnnnnnnnnnnnnnnnnnnnnnnnnnnnnnnnnnnnnnnnnnnnnnnnnnnnnnnnnnnnnnnnnnnnnnnnnnnnnnnnnnnnnnnnnnnnnnnnnnnnnnnnnnnnnnnnnnnnnnnnnnnnnnnnnnnnnnnnnnnnnnnnnnnnnnnnnnnnnnnnnnnnnnnnnnnnnnnnnnnnnnnnnnnnnnnnnnnnnnnnnnnnnnnnnnnnnnnnnnnnnnnnnnnnnnnnnnnnnnnnnnnnnnnnnnnnnnnnnnnnnnnnnnnnnnnnnnnnnnnnnnnnnnnnnnnnnnnnnnnnnnnnnnnnnnnnnnnnnnnnnnnnnnnnnnnnnnnnnnnnnnnnnnnnnnnnnnnnnnnnnnnnnnnnnnnnnnnnnnnnnnnnnnnnnnnnnnnnnnnnnnnnnnnnnnnnnnnnnnnnnnnnnnnnnnnnnnnnnnnnnnnnnnnnnnnnnnnnnnnnnnnnnnnnnnnnnnnnnnnnnnnnnnnnnnnnnnnnnnnnnnnnnnnnnnnnnnnnnnnnnnnnnnnnnnnnnnnnnnnnnnnnnnnnnnnnnnnnnnnnnnnnnnnnnnnnnnnnnnnnnnnnnnnnnnnnnnnnnnnnnnnnnnnnnnnnnnnnnnnnnnnnnnnnnnnnnnnnnnnnnnnnnnnnnnnnnnnnnnnnnnnnnnnnnnnnnnnnnnnnnnnnnnnnnnnnnnnnnnnnnnnnnnnnnnnnnnnnnnnnnnnnnnnnnnnnnnnnnnnnnnnnnnnnnnnnnnnnnnnnnnnnnnnnnnnnnnnnnnnnnnnnnnnnnnnnnnnnnnnnnnnnnnnnnnnnnnnnnnnnnnnnnnnnnnnnnnnnnnnnnnnnnnnnnnnnnnnnnnnnnnnnnnnnnnnnnnnnnnnnnnnnnnnnnnnnnnnnnnnnnnnnnnnnnnnnnnnnnnnnnnnnnnnnnnnnnnnnnnnnnnnnnnnnnnnnnnnnnnnnnnnnnnnnnnnnnnnnnnnnnnnnnnnnnnnnnnnnnnnnnnnnnnnnnnnnnnnnnnnnnnnnnnnnnnnnnnnnnnnnnnnnnnnnnnnnnnnnnnnnnnnnnnnnnnnnnnnnnnnnnnnnnnnnnnnnnnnnnnnnnnnnnnnnnnnnnnnnnnnnnnnnnnnnnnnnnnnnnnnnnnnnnnnnnnnnnnnnnnnnnnnnnnnnnnnnnnnnnnnnnnnnnnnnnnnnnnnnnnnnnnnnnnnnnnnnnnnnnnnnnnnnnnnnnnnnnnnnnnnnnnnnnnnnnnnnnnnnnnnnnnnnnnnnnnnnnnnnnnnnnnnnnnnnnnnnnnnnnnnnnnnnnnnnnnnnnnnnnnnnnnnnnnnnnnnnnnnnnnnnnnnnnnnnnnnnnnnnnnnnnnnnnnnnnnnnnnnnnnnnnnnnnnnnnnnnnnnnnnnnnnnnnnnnnnnnnnnnnnnnnnnnnnnnnnnnnnnnnnnnnnnnnnnnnnnnnnnnnnnnnnnnnnnnnnnnnnnnnnnnnnnnnnnnnnnnnnnnnnnnnnnnnnnnnnnnnnnnnnnnnnnnnnnnnnnnnnnnnnnnnnnnnnnnnnnnnnnnnnnnnnnnnnnnnnnnnnnnnnnnnnnnnnnnnnnnnnnnnnnnnnnnnnnnnnnnnnnnnnnnnnnnnnnnnnnnnnnnnnnnnnnnnnnnnnnnnnnnnnnnnnnnnnnnnnnnnnnnnnnnnnnnnnnnnnnnnnnnnnnnnnnnnnnnnnnnnnnnnnnnnnnnnnnnnnnnnnnnnnnnnnnnnnnnnnnnnnnnnnnnnnnnnnnnnnnnnnnnnnnnnnnnnnnnnnnnnnnnnnnnnnnnnnnnnnnnnnnnnnnnnnnnnnnnnnnnnnnnnnnnnnnnnnnnnnnnnnnnnnnnnnnnnnnnnnnnnnnnnnnnnnnnnnnnnnnnnnnnnnnnnnnnnnnnnnnnnnnnnnnnnnnnnnnnnnnnnnnnnnnnnnnnnnnnnnnnnnnnnnnnnnnnnnnnnnnnnnnnnnnnnnnnnnnnnnnnnnnnnnnnnnnnnnnnnnnnnnnnnnnnnnnnnnnnnnnnnnnnnnnnnnnnnnnnnnnnnnnnnnnnnnnnnnnnnnnnnnnnnnnnnnnnnnnnnnnnnnnnnnnnnnnnnnnnnnnnnnnnnnnnnnnnnnnnnnnnnnnnnnnnnnnnnnnnnnnnnnnnnnnnnnnnnnnnnnnnnnnnnnnnnnnnnnnnnnnnnnnnnnnnnnnnnnnnnnnnnnnnnnnnnnnnnnnnnnnnnnnnnnnnnnnnnnnnnnnnnnnnnnnnnnnnnnnnnnnnnnnnnnnnnnnnnnnnnnnnnnnnnnnnnnnnnnnnnnnnnnnnnnnnnnnnnnnnnnnnnnnnnnnnnnnnnnnnnnnnnnnnnnnnnnnnnnnnnnnnnnnnnnnnnnnnnnnnnnnnnnnnnnnnnnnnnnnnnnnnnnnnnnnnnnnnnnnnnnnnnnnnnnnnnnnnnnnnnnnnnnnnnnnnnnnnnnnnnnnnnnnnnnnnnnnnnnnnnnnnnnnnnnnnnnnnnnnnnnnnnnnnnnnnnnnnnnnnnnnnnnnnnnnnnnnnnnnnnnnnnnnnnnnnnnnnnnnnnnnnnnnnnnnnnnnnnnnnnnnnnnnnnnnnnnnnnnnnnnnnnnnnnnnnnnnnnnnnnnnnnnnnnnnnnnnnnnnnnnnnnnnnnnnnnnnnnnnnnnnnnnnnnnnnnnnnnnnnnnnnnnnnnnnnnnnnnnnnnnnnnnnnnnnnnnnnnnnnnnnnnnnnnnnnnnnnnnnnnnnnnnnnnnnnnnnnnnnnnnnnnnnnnnnnnnnnnnnnnnnnnnnnnnnnnnnnnnnnnnnnnnnnnnnnnnnnnnnnnnnnnnnnnnnnnnnnnnnnnnnnnnnnnnnnnnnnnnnnnnnnnnnnnnnnnnnnnnnnnnnnnnnnnnnnnnnnnnnnnnnnnnnnnnnnnnnnnnnnnnnnnnnnnnnnnnnnnnnnnnnnnnnnnnnnnnnnnnnnnnnnnnnnnnnnnnnnnnnnnnnnnnnnnnnnnnnnnnnnnnnnnnnnnnnnnnnnnnnnnnnnnnnnnnnnnnnnnnnnnnnnnnnnnnnnnnnnnnnnnnnnnnnnnnnnnnnnnnnnnnnnnnnnnnnnnnnnnnnnnnnnnnnnnnnnnnnnnnnnnnnnnnnnnnnnnnnnnnnnnnnnnnnnnnnnnnnnnnnnnnnnnnnnnnnnnnnnnnnnnnnnnnnnnnnnnnnnnnnnnnnnnnnnnnnnnnnnnnnnnnnnnnnnnnnnnnnnnnnnnnnnnnnnnnnnnnnnnnnnnnnnnnnnnnnnnnnnnnnnnnnnnnnnnnnnnnnnnnnnnnnnnnnnnnnnnnnnnnnnnnnnnnnnnnnnnnnnnnnnnnnnnnnnnnnnnnnnnnnnnnnnnnnnnnnnnnnnnnnnnnnnnnnnnnnnnnnnnnnnnnnnnnnnnnnnnnnnnnnnnnnnnnnnnnnnnnnnnnnnnnnnnnnnnnnnnnnnnnnnnnnnnnnnnnnnnnnnnnnnnnnnnnnnnnnnnnnnnnnnnnnnnnnnnnnnnnnnnnnnnnnnnnnnnnnnnnnnnnnnnnnnnnnnnnnnnnnnnnnnnnnnnnnnnnnnnnnnnnnnnnnnnnnnnnnnnnnnnnnnnnnnnnnnnnnnnnnnnnnnnnnnnnnnnnnnnnnnnnnnnnnnnnnnnnnnnnnnnnnnnnnnnnnnnnnnnnnnnnnnnnnnnnnnnnnnnnnnnnnnnnnnnnnnnnnnnnnnnnnnnnnnnnnnnnnnnnnnnnnnnnnnnnnnnnnnnnnnnnnnnnnnnnnnnnnnnnnnnnnnnnnnnnnnnnnnnnnnnnnnnnnnnnnnnnnnnnnnnnnnnnnnnnnnnnnnnnnnnnnnnnnnnnnnnnnnnnnnnnnnnnnnnnnnnnnnnnnnnnnnnnnnnnnnnnnnnnnnnnnnnnnnnnnnnnnnnnnnnnnnnnnnnnnnnnnnnnnnnnnnnnnnnnnnnnnnnnnnnnnnnnnnnnnnnnnnnnnnnnnnnnnnnnnnnnnnnnnnnnnnnnnnnnnnnnnnnnnnnnnnnnnnnnnnnnnnnnnnnnnnnnnnnnnnnnnnnnnnnnnnnnnnnnnnnnnnnnnnnnnnnnnnnnnnnnnnnnnnnnnnnnnnnnnnnnnnnnnnnnnnnnnnnnnnnnnnnnnnnnnnnnnnnnnnnnnnnnnnnnnnnnnnnnnnnnnnnnnnnnnnnnnnnnnnnnnnnnnnnnnnnnnnnnnnnnnnnnnnnnnnnnnnnnnnnnnnnnnnnnnnnnnnnnnnnnnnnnnnnnnnnnnnnnnnnnnnnnnnnnnnnnnnnnnnnnnnnnnnnnnnnnnnnnnnnnnnnnnnnnnnnnnnnnnnnnnnnnnnnnnnnnnnnnnnnnnnnnnnnnnnnnnnnnnnnnnnnnnnnnnnnnnnnnnnnnnnnnnnnnnnnnnnnnnnnnnnnnnnnnnnnnnnnnnnnnnnnnnnnnnnnnnnnnnnnnnnnnnnnnnnnnnnnnnnnnnnnnnnnnnnnnnnnnnnnnnnnnnnnnnnnnnnnnnnnnnnnnnnnnnnnnnnnnnnnnnnnnnnnnnnnnnnnnnnnnnnnnnnnnnnnnnnnnnnnnnnnnnnnnnnnnnnnnnnnnnnnnnnnnnnnnnnnnnnnnnnnnnnnnnnnnnnnnnnnnnnnnnnnnnnnnnnnnnnnnnnnnnnnnnnnnnnnnnnnnnnnnnnnnnnnnnnnnnnnnnnnnnnnnnnnnnnnnnnnnnnnnnnnnnnnnnnnnnnnnnnnnnnnnnnnnnnnnnnnnnnnnnnnnnnnnnnnnnnnnnnnnnnnnnnnnnnnnnnnnnnnnnnnnnnnnnnnnnnnnnnnnnnnnnnnnnnnnnnnnnnnnnnnnnnnnnnnnnnnnnnnnnnnnnnnnnnnnnnnnnnnnnnnnnnnnnnnnnnnnnnnnnnnnnnnnnnnnnnnnnnnnnnnnnnnnnnnnnnnnnnnnnnnnnnnnnnnnnnnnnnnnnnnnnnnnnnnnnnnnnnnnnnnnnnnnnnnnnnnnnnnnnnnnnnnnnnnnnnnnnnnnnnnnnnnnnnnnnnnnnnnnnnnnnnnnnnnnnnnnnnnnnnnnnnnnnnnnnnnnnnnnnnnnnnnnnnnnnnnnnnnnnnnnnnnnnnnnnnnnnnnnnnnnnnnnnnnnnnnnnnnnnnnnnnnnnnnnnnnnnnnnnnnnnnnnnnnnnnnnnnnnnnnnnnnnnnnnnnnnnnnnnnnnnnnnnnnnnnnnnnnnnnnnnnnnnnnnnnnnnnnnnnnnnnnnnnnnnnnnnnnnnnnnnnnnnnnnnnnnnnnnnnnnnnnnnnnnnnnnnnnnnnnnnnnnnnnnnnnnnnnnnnnnnnnnnnnnnnnnnnnnnnnnnnnnnnnnnnnnnnnnnnnnnnnnnnnnnnnnnnnnnnnnnnnnnnnnnnnnnnnnnnnnnnnnnnnnnnnnnnnnnnnnnnnnnnnnnnnnnnnnnnnnnnnnnnnnnnnnnnnnnnnnnnnnnnnnnnnnnnnnnnnnnnnnnnnnnnnnnnnnnnnnnnnnnnnnnnnnnnnnnnnnnnnnnnnnnnnnnnnnnnnnnnnnnnnnnnnnnnnnnnnnnnnnnnnnnnnnnnnnnnnnnnnnnnnnnnnnnnnnnnnnnnnnnnnnnnnnnnnnnnnnnnnnnnnnnnnnnnnnnnnnnnnnnnnnnnnnnnnnnnnnnnnnnnnnnnnnnnnnnnnnnnnnnnnnnnnnnnnnnnnnnnnnnnnnnnnnnnnnnnnnnnnnnnnnnnnnnnnnnnnnnnnnnnnnnnnnnnnnnnnnnnnnnnnnnnnnnnnnnnnnnnnnnnnnnnnnnnnnnnnnnnnnnnnnnnnnnnnnnnnnnnnnnnnnnnnnnnnnnnnnnnnnnnnnnnnnnnnnnnnnnnnnnnnnnnnnnnnnnnnnnnnnnnnnnnnnnnnnnnnnnnnnnnnnnnnnnnnnnnnnnnnnnnnnnnnnnnnnnnnnnnnnnnnnnnnnnnnnnnnnnnnnnnnnnnnnnnnnnnnnnnnnnnnnnnnnnnnnnnnnnnnnnnnnnnnnnnnnnnnnnnnnnnnnnnnnnnnnnnnnnnnnnnnnnnnnnnnnnnnnnnnnnnnnnnnnnnnnnnnnnnnnnnnnnnnnnnnnnnnnnnnnnnnnnnnnnnnnnnnnnnnnnnnnnnnnnnnnnnnnnnnnnnnnnnnnnnnnnnnnnnnnnnnnnnnnnnnnnnnnnnnnnnnnnnnnnnnnnnnnnnnnnnnnnnnnnnnnnnnnnnnnnnnnnnnnnnnnnnnnnnnnnnnnnnnnnnnnnnnnnnnnnnnnnnnnnnnnnnnnnnnnnnnnnnnnnnnnnnnnnnnnnnnnnnnnnnnnnnnnnnnnnnnnnnnnnnnnnnnnnnnnnnnnnnnnnnnnnnnnnnnnnnnnnnnnnnnnnnnnnnnnnnnnnnnnnnnnnnnnnnnnnnnnnnnnnnnnnnnnnnnnnnnnnnnnnnnnnnnnnnnnnnnnnnnnnnnnnnnnnnnnnnnnnnnnnnnnnnnnnnnnnnnnnnnnnnnnnnnnnnnnnnnnnnnnnnnnnnnnnnnnnnnnnnnnnnnnnnnnnnnnnnnnnnnnnnnnnnnnnnnnnnnnnnnnnnnnnnnnnnnnnnnnnnnnnnnnnnnnnnnnnnnnnnnnnnnnnnnnnnnnnnnnnnnnnnnnnnnnnnnnnnnnnnnnnnnnnnnnnnnnnnnnnnnnnnnnnnnnnnnnnnnnnnnnnnnnnnnnnnnnnnnnnnnnnnnnnnnnnnnnnnnnnnnnnnnnnnnnnnnnnnnnnnnnnnnnnnnnnnnnnnnnnnnnnnnnnnnnnnnnnnnnnnnnnnnnnnnnnnnnnnnnnnnnnnnnnnnnnnnnnnnnnnnnnnnnnnnnnnnnnnnnnnnnnnnnnnnnnnnnnnnnnnnnnnnnnnnnnnnnnnnnnnnnnnnnnnnnnnnnnnnnnnnnnnnnnnnnnnnnnnnnnnnnnnnnnnnnnnnnnnnnnnnnnnnnnnnnnnnnnnnnnnnnnnnnnnnnnnnnnnnnnnnnnnnnnnnnnnnnnnnnnnnnnnnnnnnnnnnnnnnnnnnnnnnnnnnnnnnnnnnnnnnnnnnnnnnnnnnnnnnnnnnnnnnnnnnnnnnnnnnnnnnnnnnnnnnnnnnnnnnnnnnnnnnnnnnnnnnnnnnnnnnnnnnnnnnnnnnnnnnnnnnnnnnnnnnnnnnnnnnnnnnnnnnnnnnnnnnnnnnnnnnnnnnnnnnnnnnnnnnnnnnnnnnnnnnnnnnnnnnnnnnnnnnnnnnnnnnnnnnnnnnnnnnnnnnnnnnnnnnnnnnnnnnnnnnnnnnnnnnnnnnnnnnnnnnnnnnnnnnnnnnnnnnnnnnnnnnnnnnnnnnnnnnnnnnnnnnnnnnnnnnnnnnnnnnnnnnnnnnnnnnnnnnnnnnnnnnnnnnnnnnnnnnnnnnnnnnnnnnnnnnnnnnnnnnnnnnnnnnnnnnnnnnnnnnnnnnnnnnnnnnnnnnnnnnnnnnnnnnnnnnnnnnnnnnnnnnnnnnnnnnnnnnnnnnnnnnnnnnnnnnnnnnnnnnnnnnnnnnnnnnnnnnnnnnnnnnnnnnnnnnnnnnnnnnnnnnnnnnnnnnnnnnnnnnnnnnnnnnnnnnnnnnnnnnnnnnnnnnnnnnnnnnnnnnnnnnnnnnnnnnnnnnnnnnnnnnnnnnnnnnnnnnnnnnnnnnnnnnnnnnnnnnnnnnnnnnnnnnnnnnnnnnnnnnnnnnnnnnnnnnnnnnnnnnnnnnnnnnnnnnnnnnnnnnnnnnnnnnnnnnnnnnnnnnnnnnnnnnnnnnnnnnnnnnnnnnnnnnnnnnnnnnnnnnnnnnnnnnnnnnnnnnnnnnnnnnnnnnnnnnnnnnnnnnnnnnnnnnnnnnnnnnnnnnnnnnnnnnnnnnnnnnnnnnnnnnnnnnnnnnnnnnnnnnnnnnnnnnnnnnnnnnnnnnnnnnnnnnnnnnnnnnnnnnnnnnnnnnnnnnnnnnnnnnnnnnnnnnnnnnnnnnnnnnnnnnnnnnnnnnnnnnnnnnnnnnnnnnnnnnnnnnnnnnnnnnnnnnnnnnnnnnnnnnnnnnnnnnnnnnnnnnnnnnnnnnnnnnnnnnnnnnnnnnnnnnnnnnnnnnnnnnnnnnnnnnnnnnnnnnnnnnnnnnnnnnnnnnnnnnnnnnnnnnnnnnnnnnnnnnnnnnnnnnnnnnnnnnnnnnnnnnnnnnnnnnnnnnnnnnnnnnnnnnnnnnnnnnnnnnnnnnnnnnnnnnnnnnnnnnnnnnnnnnnnnnnnnnnnnnnnnnnnnnnnnnnnnnnnnnnnnnnnnnnnnnnnnnnnnnnnnnnnnnnnnnnnnnnnnnnnnnnnnnnnnnnnnnnnnnnnnnnnnnnnnnnnnnnnnnnnnnnnnnnnnnnnnnnnnnnnnnnnnnnnnnnnnnnnnnnnnnnnnnnnnnnnnnnnnnnnnnnnnnnnnnnnnnnnnnnnnnnnnnnnnnnnnnnnnnnnnnnnnnnnnnnnnnnnnnnnnnnnnnnnnnnnnnnnnnnnnnnnnnnnnnnnnnnnnnnnnnnnnnnnnnnnnnnnnnnnnnnnnnnnnnnnnnnnnnnnnnnnnnnnnnnnnnnnnnnnnnnnnnnnnnnnnnnnnnnnnnnnnnnnnnnnnnnnnnnnnnnnnnnnnnnnnnnnnnnnnnnnnnnnnnnnnnnnnnnnnnnnnnnnnnnnnnnnnnnnnnnnnnnnnnnnnnnnnnnnnnnnnnnnnnnnnnnnnnnnnnnnnnnnnnnnnnnnnnnnnnnnnnnnnnnnnnnnnnnnnnnnnnnnnnnnnnnnnnnnnnnnnnnnnnnnnnnnnnnnnnnnnnnnnnnnnnnnnnnnnnnnnnnnnnnnnnnnnnnnnnnnnnnnnnnnnnnnnnnnnnnnnnnnnnnnnnnnnnnnnnnnnnnnnnnnnnnnnnnnnnnnnnnnnnnnnnnnnnnnnnnnnnnnnnnnnnnnnnnnnnnnnnnnnnnnnnnnnnnnnnnnnnnnnnnnnnnnnnnnnnnnnnnnnnnnnnnnnnnnnnnnnnnnnnnnnnnnnnnnnnnnnnnnnnnnnnnnnnnnnnnnnnnnnnnnnnnnnnnnnnnnnnnnnnnnnnnnnnnnnnnnnnnnnnnnnnnnnnnnnnnnnnnnnnnnnnnnnnnnnnnnnnnnnnnnnnnnnnnnnnnnnnnnnnnnnnnnnnnnnnnnnnnnnnnnnnnnnnnnnnnnnnnnnnnnnnnnnnnnnnnnnnnnnnnnnnnnnnnnnnnnnnnnnnnnnnnnnnnnnnnnnnnnnnnnnnnnnnnnnnnnnnnnnnnnnnnnnnnnnnnnnnnnnnnnnnnnnnnnnnnnnnnnnnnnnnnnnnnnnnnnnnnnnnnnnnnnnnnnnnnnnnnnnnnnnnnnnnnnnnnnnnnnnnnnnnnnnnnnnnnnnnnnnnnnnnnnnnnnnnnnnnnnnnnnnnnnnnnnnnnnnnnnnnnnnnnnnnnnnnnnnnnnnnnnnnnnnnnnnnnnnnnnnnnnnnnnnnnnnnnnnnnnnnnnnnnnnnnnnnnnnnnnnnnnnnnnnnnnnnnnnnnnnnnnnnnnnnnnnnnnnnnnnnnnnnnnnnnnnnnnnnnnnnnnnnnnnnnnnnnnnnnnnnnnnnnnnnnnnnnnnnnnnnnnnnnnnnnnnnnnnnnnnnnnnnnnnnnnnnnnnnnnnnnnnnnnnnnnnnnnnnnnnnnnnnnnnnnnnnnnnnnnnnnnnnnnnnnnnnnnnnnnnnnnnnnnnnnnnnnnnnnnnnnnnnnnnnnnnnnnnnnnnnnnnnnnnnnnnnnnnnnnnnnnnnnnnnnnnnnnnnnnnnnnnnnnnnnnnnnnnnnnnnnnnnnnnnnnnnnnnnnnnnnnnnnnnnnnnnnnnnnnnnnnnnnnnnnnnnnnnnnnnnnnnnnnnnnnnnnnnnnnnnnnnnnnnnnnnnnnnnnnnnnnnnnnnnnnnnnnnnnnnnnnnnnnnnnnnnnnnnnnnnnnnnnnnnnnnnnnnnnnnnnnnnnnnnnnnnnnnnnnnnnnnnnnnnnnnnnnnnnnnnnnnnnnnnnnnnnnnnnnnnnnnnnnnnnnnnnnnnnnnnnnnnnnnnnnnnnnnnnnnnnnnnnnnnnnnnnnnnnnnnnnnnnnnnnnnnnnnnnnnnnnnnnnnnnnnnnnnnnnnnnnnnnnnnnnnnnnnnnnnnnnnnnnnnnnnnnnnnnnnnnnnnnnnnnnnnnnnnnnnnnnnnnnnnnnnnnnnnnnnnnnnnnnnnnnnnnnnnnnnnnnnnnnnnnnnnnnnnnnnnnnnnnnnnnnnnnnnnnnnnnnnnnnnnnnnnnnnnnnnnnnnnnnnnnnnnnnnnnnnnnnnnnnnnnnnnnnnnnnnnnnnnnnnnnnnnnnnnnnnnnnnnnnnnnnnnnnnnnnnnnnnnnnnnnnnnnnnnnnnnnnnnnnnnnnnnnnnnnnnnnnnnnnnnnnnnnnnnnnnnnnnnnnnnnnnnnnnnnnnnnnnnnnnnnnnnnnnnnnnnnnnnnnnnnnnnnnnnnnnnnnnnnnnnnnnnnnnnnnnnnnnnnnnnnnnnnnnnnnnnnnnnnnnnnnnnnnnnnnnnnnnnnnnnnnnnnnnnnnnnnnnnnnnnnnnnnnnnnnnnnnnnnnnnnnnnnnnnnnnnnnnnnnnnnnnnnnnnnnnnnnnnnnnnnnnnnnnnnnnnnnnnnnnnnnnnnnnnnnnnnnnnnnnnnnnnnnnnnnnnnnnnnnnnnnnnnnnnnnnnnnnnnnnnnnnnnnnnnnnnnnnnnnnnnnnnnnnnnnnnnnnnnnnnnnnnnnnnnnnnnnnnnnnnnnnnnnnnnnnnnnnnnnnnnnnnnnnnnnnnnnnnnnnnnnnnnnnnnnnnnnnnnnnnnnnnnnnnnnnnnnnnnnnnnnnnnnnnnnnnnnnnnnnnnnnnnnnnnnnnnnnnnnnnnnnnnnnnnnnnnnnnnnnnnnnnnnnnnnnnnnnnnnnnnnnnnnnnnnnnnnnnnnnnnnnnnnnnnnnnnnnnnnnnnnnnnnnnnnnnnnnnnnnnnnnnnnnnnnnnnnnnnnnnnnnnnnnnnnnnnnnnnnnnnnnnnnnnnnnnnnnnnnnnnnnnnnnnnnnnnnnnnnnnnnnnnnnnnnnnnnnnnnnnnnnnnnnnnnnnnnnnnnnnnnnnnnnnnnnnnnnnnnnnnnnnnnnnnnnnnnnnnnnnnnnnnnnnnnnnnnnnnnnnnnnnnnnnnnnnnnnnnnnnnnnnnnnnnnnnnnnnnnnnnnnnnnnnnnnnnnnnnnnnnnnnnnnnnnnnnnnnnnnnnnnnnnnnnnnnnnnnnnnnnnnnnnnnnnnnnnnnnnnnnnnnnnnnnnnnnnnnnnnnnnnnnnnnnnnnnnnnnnnnnnnnnnnnnnnnnnnnnnnnnnnnnnnnnnnnnnnnnnnnnnnnnnnnnnnnnnnnnnnnnnnnnnnnnnnnnnnnnnnnnnnnnnnnnnnnnnnnnnnnnnnnnnnnnnnnnnnnnnnnnnnnnnnnnnnnnnnnnnnnnnnnnnnnnnnnnnnnnnnnnnnnnnnnnnnnnnnnnnnnnnnnnnnnnnnnnnnnnnnnnnnnnnnnnnnnnnnnnnnnnnnnnnnnnnnnnnnnnnnnnnnnnnnnnnnnnnnnnnnnnnnnnnnnnnnnnnnnnnnnnnnnnnnnnnnnnnnnnnnnnnnnnnnnnnnnnnnnnnnnnnnnnnnnnnnnnnnnnnnnnnnnnnnnnnnnnnnnnnnnnnnnnnnnnnnnnnnnnnnnnnnnnnnnnnnnnnnnnnnnnnnnnnnnnnnnnnnnnnnnnnnnnnnnnnnnnnnnnnnnnnnnnnnnnnnnnnnnnnnnnnnnnnnnnnnnnnnnnnnnnnnnnnnnnnnnnnnnnnnnnnnnnnnnnnnnnnnnnnnnnnnnnnnnnnnnnnnnnnnnnnnnnnnnnnnnnnnnnnnnnnnnnnnnnnnnnnnnnnnnnnnnnnnnnnnnnnnnnnnnnnnnnnnnnnnnnnnnnnnnnnnnnnnnnnnnnnnnnnnnnnnnnnnnnnnnnnnnnnnnnnnnnnnnnnnnnnnnnnnnnnnnnnnnnnnnnnnnnnnnnnnnnnnnnnnnnnnnnnnnnnnnnnnnnnnnnnnnnnnnnnnnnnnnnnnnnnnnnnnnnnnnnnnnnnnnnnnnnnnnnnnnnnnnnnnnnnnnnnnnnnnnnnnnnnnnnnnnnnnnnnnnnnnnnnnnnnnnnnnnnnnnnnnnnnnnnnnnnnnnnnnnnnnnnnnnnnnnnnnnnnnnnnnnnnnnnnnnnnnnnnnnnnnnnnnnnnnnnnnnnnnnnnnnnnnnnnnnnnnnnnnnnnnnnnnnnnnnnnnnnnnnnnnnnnnnnnnnnnnnnnnnnnnnnnnnnnnnnnnnnnnnnnnnnnnnnnnnnnnnnnnnnnnnnnnnnnnnnnnnnnnnnnnnnnnnnnnnnnnnnnnnnnnnnnnnnnnnnnnnnnnnnnnnnnnnnnnnnnnnnnnnnnnnnnnnnnnnnnnnnnnnnnnnnnnnnnnnnnnnnnnnnnnnnnnnnnnnnnnnnnnnnnnnnnnnnnnnnnnnnnnnnnnnnnnnnnnnnnnnnnnnnnnnnnnnnnnnnnnnnnnnnnnnnnnnnnnnnnnnnnnnnnnnnnnnnnnnnnnnnnnnnnnnnnnnnnnnnnnnnnnnnnnnnnnnnnnnnnnnnnnnnnnnnnnnnnnnnnnnnnnnnnnnnnnnnnnnnnnnnnnnnnnnnnnnnnnnnnnnnnnnnnnnnnnnnnnnnnnnnnnnnnnnnnnnnnnnnnnnnnnnnnnnnnnnnnnnnnnnnnnnnnnnnnnnnnnnnnnnnnnnnnnnnnnnnnnnnnnnnnnnnnnnnnnnnnnnnnnnnnnnnnnnnnnnnnnnnnnnnnnnnnnnnnnnnnnnnnnnnnnnnnnnnnnnnnnnnnnnnnnnnnnnnnnnnnnnnnnnnnnnnnnnnnnnnnnnnnnnnnnnnnnnnnnnnnnnnnnnnnnnnnnnnnnnnnnnnnnnnnnnnnnnnnnnnnnnnnnnnnnnnnnnnnnnnnnnnnnnnnnnnnnnnnnnnnnnnnnnnnnnnnnnnnnnnnnnnnnnnnnnnnnnnnnnnnnnnnnnnnnnnnnnnnnnnnnnnnnnnnnnnnnnnnnnnnnnnnnnnnnnnnnnnnnnnnnnnnnnnnnnnnnnnnnnnnnnnnnnnnnnnnnnnnnnnnnnnnnnnnnnnnnnnnnnnnnnnnnnnnnnnnnnnnnnnnnnnnnnnnnnnnnnnnnnnnnnnnnnnnnnnnnnnnnnnnnnnnnnnnnnnnnnnnnnnnnnnnnnnnnnnnnnnnnnnnnnnnnnnnnnnnnnnnnnnnnnnnnnnnnnnnnnnnnnnnnnnnnnnnnnnnnnnnnnnnnnnnnnnnnnnnnnnnnnnnnnnnnnnnnnnnnnnnnnnnnnnnnnnnnnnnnnnnnnnnnnnnnnnnnnnnnnnnnnnnnnnnnnnnnnnnnnnnnnnnnnnnnnnnnnnnnnnnnnnnnnnnnnnnnnnnnnnnnnnnnnnnnnnnnnnnnnnnnnnnnnnnnnnnnnnnnnnnnnnnnnnnnnnnnnnnnnnnnnnnnnnnnnnnnnnnnnnnnnnnnnnnnnnnnnnnnnnnnnnnnnnnnnnnnnnnnnnnnnnnnnnnnnnnnnnnnnnnnnnnnnnnnnnnnnnnnnnnnnnnnnnnnnnnnnnnnnnnnnnnnnnnnnnnnnnnnnnnnnnnnnnnnnnnnnnnnnnnnnnnnnnnnnnnnnnnnnnnnnnnnnnnnnnnnnnnnnnnnnnnnnnnnnnnnnnnnnnnnnnnnnnnnnnnnnnnnnnnnnnnnnnnnnnnnnnnnnnnnnnnnnnnnnnnnnnnnnnnnnnnnnnnnnnnnnnnnnnnnnnnnnnnnnnnnnnnnnnnnnnnnnnnnnnnnnnnnnnnnnnnnnnnnnnnnnnnnnnnnnnnnnnnnnnnnnnnnnnnnnnnnnnnnnnnnnnnnnnnnnnnnnnnnnnnnnnnnnnnnnnnnnnnnnnnnnnnnnnnnnnnnnnnnnnnnnnnnnnnnnnnnnnnnnnnnnnnnnnnnnnnnnnnnnnnnnnnnnnnnnnnnnnnnnnnnnnnnnnnnnnnnnnnnnnnnnnnnnnnnnnnnnnnnnnnnnnnnnnnnnnnnnnnnnnnnnnnnnnnnnnnnnnnnnnnnnnnnnnnnnnnnnnnnnnnnnnnnnnnnnnnnnnnnnnnnnnnnnnnnnnnnnnnnnnnnnnnnnnnnnnnnnnnnnnnnnnnnnnnnnnnnnnnnnnnnnnnnnnnnnnnnnnnnnnnnnnnnnnnnnnnnnnnnnnnnnnnnnnnnnnnnnnnnnnnnnnnnnnnnnnnnnnnnnnnnnnnnnnnnnnnnnnnnnnnnnnnnnnnnnnnnnnnnnnnnnnnnnnnnnnnnnnnnnnnnnnnnnnnnnnnnnnnnnnnnnnnnnnnnnnnnnnnnnnnnnnnnnnnnnnnnnnnnnnnnnnnnnnnnnnnnnnnnnnnnnnnnnnnnnnnnnnnnnnnnnnnnnnnnnnnnnnnnnnnnnnnnnnnnnnnnnnnnnnnnnnnnnnnnnnnnnnnnnnnnnnnnnnnnnnnnnnnnnnnnnnnnnnnnnnnnnnnnnnnnnnnnnnnnnnnnnnnnnnnnnnnnnnnnnnnnnnnnnnnnnnnnnnnnnnnnnnnnnnnnnnnnnnnnnnnnnnnnnnnnnnnnnnnnnnnnnnnnnnnnnnnnnnnnnnnnnnnnnnnnnnnnnnnnnnnnnnnnnnnnnnnnnnnnnnnnnnnnnnnnnnnnnnnnnnnnnnnnnnnnnnnnnnnnnnnnnnnnnnnnnnnnnnnnnnnnnnnnnnnnnnnnnnnnnnnnnnnnnnnnnnnnnnnnnnnnnnnnnnnnnnnnnnnnnnnnnnnnnnnnnnnnnnnnnnnnnnnnnnnnnnnnnnnnnnnnnnnnnnnnnnnnnnnnnnnnnnnnnnnnnnnnnnnnnnnnnnnnnnnnnnnnnnnnnnnnnnnnnnnnnnnnnnnnnnnnnnnnnnnnnnnnnnnnnnnnnnnnnnnnnnnnnnnnnnnnnnnnnnnnnnnnnnnnnnnnnnnnnnnnnnnnnnnnnnnnnnnnnnnnnnnnnnnnnnnnnnnnnnnnnnnnnnnnnnnnnnnnnnnnnnnnnnnnnnnnnnnnnnnnnnnnnnnnnnnnnnnnnnnnnnnnnnnnnnnnnnnnnnnnnnnnnnnnnnnnnnnnnnnnnnnnnnnnnnnnnnnnnnnnnnnnnnnnnnnnnnnnnnnnnnnnnnnnnnnnnnnnnnnnnnnnnnnnnnnnnnnnnnnnnnnnnnnnnnnnnnnnnnnnnnnnnnnnnnnnnnnnnnnnnnnnnnnnnnnnnnnnnnnnnnnnnnnnnnnnnnnnnnnnnnnnnnnnnnnnnnnnnnnnnnnnnnnnnnnnnnnnnnnnnnnnnnnnnnnnnnnnnnnnnnnnnnnnnnnnnnnnnnnnnnnnnnnnnnnnnnnnnnnnnnnnnnnnnnnnnnnnnnnnnnnnnnnnnnnnnnnnnnnnnnnnnnnnnnnnnnnnnnnnnnnnnnnnnnnnnnnnnnnnnnnnnnnnnnnnnnnnnnnnnnnnnnnnnnnnnnnnnnnnnnnnnnnnnnnnnnnnnnnnnnnnnnnnnnnnnnnnnnnnnnnnnnnnnnnnnnnnnnnnnnnnnnnnnnnnnnnnnnnnnnnnnnnnnnnnnnnnnnnnnnnnnnnnnnnnnnnnnnnnnnnnnnnnnnnnnnnnnnnnnnnnnnnnnnnnnnnnnnnnnnnnnnnnnnnnnnnnnnnnnnnnnnnnnnnnnnnnnnnnnnnnnnnnnnnnnnnnnnnnnnnnnnnnnnnnnnnnnnnnnnnnnnnnnnnnnnnnnnnnnnnnnnnnnnnnnnnnnnnnnnnnnnnnnnnnnnnnnnnnnnnnnnnnnnnnnnnnnnnnnnnnnnnnnnnnnnnnnnnnnnnnnnnnnnnnnnnnnnnnnnnnnnnnnnnnnnnnnnnnnnnnnnnnnnnnnnnnnnnnnnnnnnnnnnnnnnnnnnnnnnnnnnnnnnnnnnnnnnnnnnnnnnnnnnnnnnnnnnnnnnnnnnnnnnnnnnnnnnnnnnnnnnnnnnnnnnnnnnnnnnnnnnnnnnnnnnnnnnnnnnnnnnnnnnnnnnnnnnnnnnnnnnnnnnnnnnnnnnnnnnnnnnnnnnnnnnnnnnnnnnnnnnnnnnnnnnnnnnnnnnnnnnnnnnnnnnnnnnnnnnnnnnnnnnnnnnnnnnnnnnnnnnnnnnnnnnnnnnnnnnnnnnnnnnnnnnnnnnnnnnnnnnnnnnnnnnnnnnnnnnnnnnnnnnnnnnnnnnnnnnnnnnnnnnnnnnnnnnnnnnnnnnnnnnnnnnnnnnnnnnnnnnnnnnnnnnnnnnnnnnnnnnnnnnnnnnnnnnnnnnnnnnnnnnnnnnnnnnnnnnnnnnnnnnnnnnnnnnnnnnnnnnnnnnnnnnnnnnnnnnnnnnnnnnnnnnnnnnnnnnnnnnnnnnnnnnnnnnnnnnnnnnnnnnnnnnnnnnnnnnnnnnnnnnnnnnnnnnnnnnnnnnnnnnnnnnnnnnnnnnnnnnnnnnnnnnnnnnnnnnnnnnnnnnnnnnnnnnnnnnnnnnnnnnnnnnnnnnnnnnnnnnnnnnnnnnnnnnnnnnnnnnnnnnnnnnnnnnnnnnnnnnnnnnnnnnnnnnnnnnnnnnnnnnnnnnnnnnnnnnnnnnnnnnnnnnnnnnnnnnnnnnnnnnnnnnnnnnnnnnnnnnnnnnnnnnnnnnnnnnnnnnnnnnnnnnnnnnnnnnnnnnnnnnnnnnnnnnnnnnnnnnnnnnnnnnnnnnnnnnnnnnnnnnnnnnnnnnnnnnnnnnnnnnnnnnnnnnnnnnnnnnnnnnnnnnnnnnnnnnnnnnnnnnnnnnnnnnnnnnnnnnnnnnnnnnnnnnnnnnnnnnnnnnnnnnnnnnnnnnnnnnnnnnnnnnnnnnnnnnnnnnnnnnnnnnnnnnnnnnnnnnnnnnnnnnnnnnnnnnnnnnnnnnnnnnnnnnnnnnnnnnnnnnnnnnnnnnnnnnnnnnnnnnnnnnnnnnnnnnnnnnnnnnnnnnnnnnnnnnnnnnnnnnnnnnnnnnnnnnnnnnnnnnnnnnnnnnnnnnnnnnnnnnnnnnnnnnnnnnnnnnnnnnnnnnnnnnnnnnnnnnnnnnnnnnnnnnnnnnnnnnnnnnnnnnnnnnnnnnnnnnnnnnnnnnnnnnnnnnnnnnnnnnnnnnnnnnnnnnnnnnnnnnnnnnnnnnnnnnnnnnnnnnnnnnnnnnnnnnnnnnnnnnnnnnnnnnnnnnnnnnnnnnnnnnnnnnnnnnnnnnnnnnnnnnnnnnnnnnnnnnnnnnnnnnnnnnnnnnnnnnnnnnnnnnnnnnnnnnnnnnnnnnnnnnnnnnnnnnnnnnnnnnnnnnnnnnnnnnnnnnnnnnnnnnnnnnnnnnnnnnnnnnnnnnnnnnnnnnnnnnnnnnnnnnnnnnnnnnnnnnnnnnnnnnnnnnnnnnnnnnnnnnnnnnnnnnnnnnnnnnnnnnnnnnnnnnnnnnnnnnnnnnnnnnnnnnnnnnnnnnnnnnnnnnnnnnnnnnnnnnnnnnnnnnnnnnnnnnnnnnnnnnnnnnnnnnnnnnnnnnnnnnnnnnnnnnnnnnnnnnnnnnnnnnnnnnnnnnnnnnnnnnnnnnnnnnnnnnnnnnnnnnnnnnnnnnnnnnnnnnnnnnnnnnnnnnnnnnnnnnnnnnnnnnnnnnnnnnnnnnnnnnnnnnnnnnnnnnnnnnnnnnnnnnnnnnnnnnnnnnnnnnnnnnnnnnnnnnnnnnnnnnnnnnnnnnnnnnnnnnnnnnnnnnnnnnnnnnnnnnnnnnnnnnnnnnnnnnnnnnnnnnnnnnnnnnnnnnnnnnnnnnnnnnnnnnnnnnnnnnnnnnnnnnnnnnnnnnnnnnnnnnnnnnnnnnnnnnnnnnnnnnnnnnnnnnnnnnnnnnnnnnnnnnnnnnnnnnnnnnnnnnnnnnnnnnnnnnnnnnnnnnnnnnnnnnnnnnnnnnnnnnnnnnnnnnnnnnnnnnnnnnnnnnnnnnnnnnnnnnnnnnnnnnnnnnnnnnnnnnnnnnnnnnnnnnnnnnnnnnnnnnnnnnnnnnnnnnnnnnnnnnnnnnnnnnnnnnnnnnnnnnnnnnnnnnnnnnnnnnnnnnnnnnnnnnnnnnnnnnnnnnnnnnnnnnnnnnnnnnnnnnnnnnnnnnnnnnnnnnnnnnnnnnnnnnnnnnnnnnnnnnnnnnnnnnnnnnnnnnnnnnnnnnnnnnnnnnnnnnnnnnnnnnnnnnnnnnnnnnnnnnnnnnnnnnnnnnnnnnnnnnnnnnnnnnnnnnnnnnnnnnnnnnnnnnnnnnnnnnnnnnnnnnnnnnnnnnnnnnnnnnnnnnnnnnnnnnnnnnnnnnnnnnnnnnnnnnnnnnnnnnnnnnnnnnnnnnnnnnnnnnnnnnnnnnnnnnnnnnnnnnnnnnnnnnnnnnnnnnnnnnnnnnnnnnnnnnnnnnnnnnnnnnnnnnnnnnnnnnnnnnnnnnnnnnnnnnnnnnnnnnnnnnnnnnnnnnnnnnnnnnnnnnnnnnnnnnnnnnnnnnnnnnnnnnnnnnnnnnnnnnnnnnnnnnnnnnnnnnnnnnnnnnnnnnnnnnnnnnnnnnnnnnnnnnnnnnnnnnnnnnnnnnnnnnnnnnnnnnnnnnnnnnnnnnnnnnnnnnnnnnnnnnnnnnnnnnnnnnnnnnnnnnnnnnnnnnnnnnnnnnnnnnnnnnnnnnnnnnnnnnnnnnnnnnnnnnnnnnnnnnnnnnnnnnnnnnnnnnnnnnnnnnnnnnnnnnnnnnnnnnnnnnnnnnnnnnnnnnnnnnnnnnnnnnnnnnnnnnnnnnnnnnnnnnnnnnnnnnnnnnnnnnnnnnnnnnnnnnnnnnnnnnnnnnnnnnnnnnnnnnnnnnnnnnnnnnnnnnnnnnnnnnnnnnnnnnnnnnnnnnnnnnnnnnnnnnnnnnnnnnnnnnnnnnnnnnnnnnnnnnnnnnnnnnnnnnnnnnnnnnnnnnnnnnnnnnnnnnnnnnnnnnnnnnnnnnnnnnnnnnnnnnnnnnnnnnnnnnnnnnnnnnnnnnnnnnnnnnnnnnnnnnnnnnnnnnnnnnnnnnnnnnnnnnnnnnnnnnnnnnnnnnnnnnnnnnnnnnnnnnnnnnnnnnnnnnnnnnnnnnnnnnnnnnnnnnnnnnnnnnnnnnnnnnnnnnnnnnnnnnnnnnnnnnnnnnnnnnnnnnnnnnnnnnnnnnnnnnnnnnnnnnnnnnnnnnnnnnnnnnnnnnnnnnnnnnnnnnnnnnnnnnnnnnnnnnnnnnnnnnnnnnnnnnnnnnnnnnnnnnnnnnnnnnnnnnnnnnnnnnnnnnnnnnnnnnnnnnnnnnnnnnnnnnnnnnnnnnnnnnnnnnnnnnnnnnnnnnnnnnnnnnnnnnnnnnnnnnnnnnnnnnnnnnnnnnnnnnnnnnnnnnnnnnnnnnnnnnnnnnnnnnnnnnnnnnnnnnnnnnnnnnnnnnnnnnnnnnnnnnnnnnnnnnnnnnnnnnnnnnnnnnnnnnnnnnnnnnnnnnnnnnnnnnnnnnnnnnnnnnnnnnnnnnnnnnnnnnnnnnnnnnnnnnnnnnnnnnnnnnnnnnnnnnnnnnnnnnnnnnnnnnnnnnnnnnnnnnnnnnnnnnnnnnnnnnnnnnnnnnnnnnnnnnnnnnnnnnnnnnnnnnnnnnnnnnnnnnnnnnnnnnnnnnnnnnnnnnnnnnnnnnnnnnnnnnnnnnnnnnnnnnnnnnnnnnnnnnnnnnnnnnnnnnnnnnnnnnnnnnnnnnnnnnnnnnnnnnnnnnnnnnnnnnnnnnnnnnnnnnnnnnnnnnnnnnnnnnnnnnnnnnnnnnnnnnnnnnnnnnnnnnnnnnnnnnnnnnnnnnnnnnnnnnnnnnnnnnnnnnnnnnnnnnnnnnnnnnnnnnnnnnnnnnnnnnnnnnnnnnnnnnnnnnnnnnnnnnnnnnnnnnnnnnnnnnnnnnnnnnnnnnnnnnnnnnnnnnnnnnnnnnnnnnnnnnnnnnnnnnnnnnnnnnnnnnnnnnnnnnnnnnnnnnnnnnnnnnnnnnnnnnnnnnnnnnnnnnnnnnnnnnnnnnnnnnnnnnnnnnnnnnnnnnnnnnnnnnnnnnnnnnnnnnnnnnnnnnnnnnnnnnnnnnnnnnnnnnnnnnnnnnnnnnnnnnnnnnnnnnnnnnnnnnnnnnnnnnnnnnnnnnnnnnnnnnnnnnnnnnnnnnnnnnnnnnnnnnnnnnnnnnnnnnnnnnnnnnnnnnnnnnnnnnnnnnnnnnnnnnnnnnnnnnnnnnnnnnnnnnnnnnnnnnnnnnnnnnnnnnnnnnnnnnnnnnnnnnnnnnnnnnnnnnnnnnnnnnnnnnnnnnnnnnnnnnnnnnnnnnnnnnnnnnnnnnnnnnnnnnnnnnnnnnnnnnnnnnnnnnnnnnnnnnnnnnnnnnnnnnnnnnnnnnnnnnnnnnnnnnnnnnnnnnnnnnnnnnnnnnnnnnnnnnnnnnnnnnnnnnnnnnnnnnnnnnnnnnnnnnnnnnnnnnnnnnnnnnnnnnnnnnnnnnnnnnnnnnnnnnnnnnnnnnnnnnnnnnnnnnnnnnnnnnnnnnnnnnnnnnnnnnnnnnnnnnnnnnnnnnnnnnnnnnnnnnnnnnnnnnnnnnnnnnnnnnnnnnnnnnnnnnnnnnnnnnnnnnnnnnnnnnnnnnnnnnnnnnnnnnnnnnnnnnnnnnnnnnnnnnnnnnnnnnnnnnnnnnnnnnnnnnnnnnnnnnnnnnnnnnnnnnnnnnnnnnnnnnnnnnnnnnnnnnnnnnnnnnnnnnnnnnnnnnnnnnnnnnnnnnnnnnnnnnnnnnnnnnnnnnnnnnnnnnnnnnnnnnnnnnnnnnnnnnnnnnnnnnnnnnnnnnnnnnnnnnnnnnnnnnnnnnnnnnnnnnnnnnnnnnnnnnnnnnnnnnnnnnnnnnnnnnnnnnnnnnnnnnnnnnnnnnnnnnnnnnnnnnnnnnnnnnnnnnnnnnnnnnnnnnnnnnnnnnnnnnnnnnnnnnnnnnnnnnnnnnnnnnnnnnnnnnnnnnnnnnnnnnnnnnnnnnnnnnnnnnnnnnnnnnnnnnnnnnnnnnnnnnnnnnnnnnnnnnnnnnnnnnnnnnnnnnnnnnnnnnnnnnnnnnnnnnnnnnnnnnnnnnnnnnnnnnnnnnnnnnnnnnnnnnnnnnnnnnnnnnnnnnnnnnnnnnnnnnnnnnnnnnnnnnnnnnnnnnnnnnnnnnnnnnnnnnnnnnnnnnnnnnnnnnnnnnnnnnnnnnnnnnnnnnnnnnnnnnnnnnnnnnnnnnnnnnnnnnnnnnnnnnnnnnnnnnnnnnnnnnnnnnnnnnnnnnnnnnnnnnnnnnnnnnnnnnnnnnnnnnnnnnnnnnnnnnnnnnnnnnnnnnnnnnnnnnnnnnnnnnnnnnnnnnnnnnnnnnnnnnnnnnnnnnnnnnnnnnnnnnnnnnnnnnnnnnnnnnnnnnnnnnnnnnnnnnnnnnnnnnnnnnnnnnnnnnnnnnnnnnnnnnnnnnnnnnnnnnnnnnnnnnnnnnnnnnnnnnnnnnnnnnnnnnnnnnnnnnnnnnnnnnnnnnnnnnnnnnnnnnnnnnnnnnnnnnnnnnnnnnnnnnnnnnnnnnnnnnnnnnnnnnnnnnnnnnnnnnnnnnnnnnnnnnnnnnnnnnnnnnnnnnnnnnnnnnnnnnnnnnnnnnnnnnnnnnnnnnnnnnnnnnnnnnnnnnnnnnnnnnnnnnnnnnnnnnnnnnnnnnnnnnnnnnnnnnnnnnnnnnnnnnnnnnnnnnnnnnnnnnnnnnnnnnnnnnnnnnnnnnnnnnnnnnnnnnnnnnnnnnnnnnnnnnnnnnnnnnnnnnnnnnnnnnnnnnnnnnnnnnnnnnnnnnnnnnnnnnnnnnnnnnnnnnnnnnnnnnnnnnnnnnnnnnnnnnnnnnnnnnnnnnnnnnnnnnnnnnnnnnnnnnnnnnnnnnnnnnnnnnnnnnnnnnnnnnnnnnnnnnnnnnnnnnnnnnnnnnnnnnnnnnnnnnnnnnnnnnnnnnnnnnnnnnnnnnnnnnnnnnnnnnnnnnnnnnnnnnnnnnnnnnnnnnnnnnnnnnnnnnnnnnnnnnnnnnnnnnnnnnnnnnnnnnnnnnnnnnnnnnnnnnnnnnnnnnnnnnnnnnnnnnnnnnnnnnnnnnnnnnnnnnnnnnnnnnnnnnnnnnnnnnnnnnnnnnnnnnnnnnnnnnnnnnnnnnnnnnnnnnnnnnnnnnnnnnnnnnnnnnnnnnnnnnnnnnnnnnnnnnnnnnnnnnnnnnnnnnnnnnnnnnnnnnnnnnnnnnnnnnnnnnnnnnnnnnnnnnnnnnnnnnnnnnnnnnnnnnnnnnnnnnnnnnnnnnnnnnnnnnnnnnnnnnnnnnnnnnnnnnnnnnnnnnnnnnnnnnnnnnnnnnnnnnnnnnnnnnnnnnnnnnnnnnnnnnnnnnnnnnnnnnnnnnnnnnnnnnnnnnnnnnnnnnnnnnnnnnnnnnnnnnnnnnnnnnnnnnnnnnnnnnnnnnnnnnnnnnnnnnnnnnnnnnnnnnnnnnnnnnnnnnnnnnnnnnnnnnnnnnnnnnnnnnnnnnnnnnnnnnnnnnnnnnnnnnnnnnnnnnnnnnnnnnnnnnnnnnnnnnnnnnnnnnnnnnnnnnnnnnnnnnnnnnnnnnnnnnnnnnnnnnnnnnnnnnnnnnnnnnnnnnnnnnnnnnnnnnnnnnnnnnnnnnnnnnnnnnnnnnnnnnnnnnnnnnnnnnnnnnnnnnnnnnnnnnnnnnnnnnnnnnnnnnnnnnnnnnnnnnnnnnnnnnnnnnnnnnnnnnnnnnnnnnnnnnnnnnnnnnnnnnnnnnnnnnnnnnnnnnnnnnnnnnnnnnnnnnnnnnnnnnnnnnnnnnnnnnnnnnnnnnnnnnnnnnnnnnnnnnnnnnnnnnnnnnnnnnnnnnnnnnnnnnnnnnnnnnnnnnnnnnnnnnnnnnnnnnnnnnnnnnnnnnnnnnnnnnnnnnnnnnnnnnnnnnnnnnnnnnnnnnnnnnnnnnnnnnnnnnnnnnnnnnnnnnnnnnnnnnnnnnnnnnnnnnnnnnnnnnnnnnnnnnnnnnnnnnnnnnnnnnnnnnnnnnnnnnnnnnnnnnnnnnnnnnnnnnnnnnnnnnnnnnnnnnnnnnnnnnnnnnnnnnnnnnnnnnnnnnnnnnnnnnnnnnnnnnnnnnnnnnnnnnnnnnnnnnnnnnnnnnnnnnnnnnnnnnnnnnnnnnnnnnnnnnnnnnnnnnnnnnnnnnnnnnnnnnnnnnnnnnnnnnnnnnnnnnnnnnnnnnnnnnnnnnnnnnnnnnnnnnnnnnnnnnnnnnnnnnnnnnnnnnnnnnnnnnnnnnnnnnnnnnnnnnnnnnnnnnnnnnnnnnnnnnnnnnnnnnnnnnnnnnnnnnnnnnnnnnnnnnnnnnnnnnnnnnnnnnnnnnnnnnnnnnnnnnnnnnnnnnnnnnnnnnnnnnnnnnnnnnnnnnnnnnnnnnnnnnnnnnnnnnnnnnnnnnnnnnnnnnnnnnnnnnnnnnnnnnnnnnnnnnnnnnnnnnnnnnnnnnnnnnnnnnnnnnnnnnnnnnnnnnnnnnnnnnnnnnnnnnnnnnnnnnnnnnnnnnnnnnnnnnnnnnnnnnnnnnnnnnnnnnnnnnnnnnnnnnnnnnnnnnnnnnnnnnnnnnnnnnnnnnnnnnnnnnnnnnnnnnnnnnnnnnnnnnnnnnnnnnnnnnnnnnnnnnnnnnnnnnnnnnnnnnnnnnnnnnnnnnnnnnnnnnnnnnnnnnnnnnnnnnnnnnnnnnnnnnnnnnnnnnnnnnnnnnnnnnnnnnnnnnnnnnnnnnnnnnnnnnnnnnnnnnnnnnnnnnnnnnnnnnnnnnnnnnnnnnnnnnnnnnnnnnnnnnnnnnnnnnnnnnnnnnnnnnnnnnnnnnnnnnnnnnnnnnnnnnnnnnnnnnnnnnnnnnnnnnnnnnnnnnnnnnnnnnnnnnnnnnnnnnnnnnnnnnnnnnnnnnnnnnnnnnnnnnnnnnnnnnnnnnnnnnnnnnnnnnnnnnnnnnnnnnnnnnnnnnnnnnnnnnnnnnnnnnnnnnnnnnnnnnnnnnnnnnnnnnnnnnnnnnnnnnnnnnnnnnnnnnnnnnnnnnnnnnnnnnnnnnnnnnnnnnnnnnnnnnnnnnnnnnnnnnnnnnnnnnnnnnnnnnnnnnnnnnnnnnnnnnnnnnnnnnnnnnnnnnnnnnnnnnnnnnnnnnnnnnnnnnnnnnnnnnnnnnnnnnnnnnnnnnnnnnnnnnnnnnnnnnnnnnnnnnnnnnnnnnnnnnnnnnnnnnnnnnnnnnnnnnnnnnnnnnnnnnnnnnnnnnnnnnnnnnnnnnnnnnnnnnnnnnnnnnnnnnnnnnnnnnnnnnnnnnnnnnnnnnnnnnnnnnnnnnnnnnnnnnnnnnnnnnnnnnnnnnnnnnnnnnnnnnnnnnnnnnnnnnnnnnnnnnnnnnnnnnnnnnnnnnnnnnnnnnnnnnnnnnnnnnnnnnnnnnnnnnnnnnnnnnnnnnnnnnnnnnnnnnnnnnnnnnnnnnnnnnnnnnnnnnnnnnnnnnnnnnnnnnnnnnnnnnnnnnnnnnnnnnnnnnnnnnnnnnnnnnnnnnnnnnnnnnnnnnnnnnnnnnnnnnnnnnnnnnnnnnnnnnnnnnnnnnnnnnnnnnnnnnnnnnnnnnnnnnnnnnnnnnnnnnnnnnnnnnnnnnnnnnnnnnnnnnnnnnnnnnnnnnnnnnnnnnnnnnnnnnnnnnnnnnnnnnnnnnnnnnnnnnnnnnnnnnnnnnnnnnnnnngagattacttttataacctagaaattataagtaggtaactgtaattaaatgtataaacttagtagggtaggccctccctctatatattatttttaaaggtaaggtcttctttaaatcatggtttaaaggccttcctagtaactagcgctttaaagttagtctaaatagatagatattagataaaataggcctttattagttataaaagctctttattctaactacttcttcttatataaagggagtatattaacttttagtactcgatagctatagaagttatttaaccctaaaattcgataagatttataagaaaaataagattatattaatttatatactactatatttatcttaccttttataatcctttaatattagttattttataatagtaaaacggttatatagctaattagttaagataaaaatatagactaggattaattatattaataaacttaagttcttagaagtatacccctctatataaattaaagctttaaaattagagataattaaaaatagcttcttagtagctagtttaataccttttttacctaattaggtacttttaaagctaaatatctagctttaaatacctaccccctctctaagctagggtagtgacttaagctagaattttatactaaaaatccctactactaggaaagatctatgttaatnnnnnnnnnnnnnnnnnnnnnnnnnnnnnnnnnnnnnnnnnnnnnnnnnnnnnnnnnnnnnnnnnnnnnnnnnnnnnnnnnnnnnnnnnnnnnnnnnnnnnnnnnnnnnnnnnnnnnnnnnnnnnnnnnnnnnnnnnnnnnnnnnnnnnnnnnnnnnnnnnnnnnnnnnnnnnnnnnnnnnnnnnnnnnnnnnnnnnnnnnnnnnnnnnnnngagactggatttgcaataggattaactgtaacggtaaaggttataataagaagtgaatactacggtcggagattacttttataacccggaaatcgcgagtgggtgactgcaattaaatgtataaactcggcaggatgggccctccctctgtgtattatttttaaaggtaaggtcttccttaaatcatggtttaaaggccttcctagcgactagcgctttgaagttagtctaaatgggtagatatcagatgaaataggccttcgttggctgtaaaagctctttattctaactacttcttcttgtataaagggagtatatcgacttttggtactcgatggccatggaagccatttaaccctaaaattcgatgagatttgtgagaaaaataagattataccaatttgtatgccactgcatttatcttaccttttacaacccctcgatatcggttgttttgcggtggtaaaacggtcgtacggccggttggttgagataaaaatgcggactgggattaaccatattgataaacttgagttcttagaagcatatccctctgtacgaattgaagctttaaaattggagacaattaaaaatagcttcttagcagctggtttaatacctttttcacctaatcgggtactttcaaaactcaatattcatcttcgaataccaaccccccctcccagcaggggtagcgattcaagccggaattttaccccaaaaaccccttttaatggcaaagatctacgtcgataggcttcgtcaatcaaagctttacttcgtacccaatctcgaagcctaataagcccttctaagtgtgcattagatcaacttgtcaaaggctgctagattgcaatgcatagtgctattctactagcaaaagaaaacaaggatttacgggatgaaaatgagaataagaagcaaaagcgggctagatctagacggcagatacctgccgaagaaggcctctcagttcaagaagcttctgaaataattgctagactggtggaagcatcagaaacacccctatatcccccggacggaagcactcaatcagggttggaaccacgaccacgggctgcaccaaggtgtagtgggtgtggaaagatagggcataagatcaataggtgttcagataaatgatcctttttagtttaattaatttaatggcgttttggttgaaatatattccttagaaaactatactcttgggtagggtggcggctcgcttacagtggcggctcgcttaccgattacgttagctagttattatgtcaaggatgacttgacgttatcaactaattagtcatagttaattttgccaacgcaatggccagctaacatcgcaaacgatcgagacaacgcaatggccagctaacatcgcaaacgatcgagacaccaagagtttggttgttgaattaaaatcagtgatacgcagtgcatatccaggaaccttggaaggtaatggcgtccaccgtaagttgtaaaatatagaaaatccaatgtgatgttatcgtacaaggcagattatagcaaaagaaaagaaatgccgtcaaagacgacaggatatctagccaaaagtagagaaaatcaatcaaaatgggcatgctctcccaccgcagccgaaaacaacccgaaaatgctttatagcttcatgccaaacatgccgtgaacacgcaaactctggcgcatactcaaatcaagcataatctcctcgctaccaccggggatagcataggcacgcacatcacggtacagtctctcgatcttaccgccctgaccgccgcggctgtaacttaaaccaccaaagatctgactagcctcgcgagcgcagaactcaaagcattgcgttgactgcgccttcaatccagcaatggcaccgccgagcttgagcatagcctcggtctcctccatagactgacactggaagatgatgttctcaagccagttgtaggtggcctcgatctggcgagccatatgggcgagtttcatgcgaataaccgggtggtcgatgagacgcttgccgaaggttttgcgcttatgtgcgtatttcatggactcctcatagcagacgcgcgagaagcgcacgcactggatcacaatgccgatacgctcgtgattgaagtttgtcatgataaccttgaagccctggttctccttgccgatcaggttctccacgggaaccttgacatcctcgaatgtgacataggtcgtaccgctagaccacacaccctggcagtccatgcgtcgggtgctaacgccaccggcttcacgctctataagcagcacgctgaggccgttcatgccatccttgccggtgcgcacagcggtcgtgaaataatcagcgtagataccgttggtgatccacttcttctcgccgttgacaatgtagtgcttgccgtcctcggtgagcttggcctcgcaacccaagtttgcgacgtcactacccgcatcgggctcggtgatggcgaggcaaatgcgcttgtcgccggccaagatacccggcaggattcggtcgacgaggggcttcttgccgaacttgaccaatggcgggcagccaattccgtagccaccgatcaggttccacaccagaccaccgctgccgacacgcgacagctcgtcggtcagaagcatctcgtggaacaaatcccaccggtctgctgacacagacttcacgcggtatggggtgtgcttctgggggaaatggacacccagcagtccagccaggtagccccgctcgcccatctgcttgtagatgtgagcgggcacttccttggcctcgtcccattcggtcacatatggctcgatctcggactcgacccactggcggacctcgtctcgcagtgcggcatgggattcactgaagtagggggatgcatactatgagcgccatatagattagcttcggtgcaaccgtaaaaggcacagatcgatgatatagagcgaaagcaagacttacaccttggtaccacgaggggtcggcgaatgggatcaactctccataagggtcctggggagcgccgatggcaggtggtgtcacggaagactcagaaatggtaggtttcggctcgggggcagcctttttcggggttggcgctggtgccgggggtgccgagggtgccgagtgtgccggtgccgtcttctttgtatccaacgaaccgatctgcagctgacccttgtacttcttcagaatgccctcgttgtggtatttccagaactgtttcgaagcgtcctttcccgcaactcgctggagaactagatatacactgtcaacgtgaattcatcggacgtagcggatgctctcggaccaacgtactcttctttccacctgttcagaacaagaagtgttaacatgtgattccctgcatttgcacacatgagttcacttaccagggtgctcatcttggaacttggaaacatcgtagacatcttcatcgataatgacccagggactgtcacccttgctatgcgaggcgacatcctctttgctaaatgtctttgccatggcgatggggggaggagatttgaggaatgaaagaaaaaaaaaaggcgtacaacaaatatttatactaagaccaagcaataaccatttgggagaaagaagagattttcaagtccggggaagctggggaatatatgagttctcagacgaggtatggggcaagaaacaaattccgccaagttcgggcgatattccaagtcaggacatgacgatgcaccaaaaggggcctcggaccgtgatagtaccagttcacatgcctccacacagagtcgaccttgggatcttacgttgtagcagtcgatgtttcattggttgccgatcatttcggtcatcgccgttgacagacagtttattggctcgtgctgcgtcataaatggaaatgccgaggcataacagttctctggtctgggtgcagtggatggctgagtcagccgagaccgggcatgtgagcatgtgaatgatgagcatgtaaacaggacggagtctgccaatattgatatctcgatagttatatgatgtaactgtcattatagtcacttgatacaattgattagttccggttcatagtttcgtcactatgtacccccggcatgtgcatgttctactacgaaaccatcaagcggtgccccggctgcggtcgagtgcatataatacgacaagaaagatggccaatttaaaagtaacataggaactttcatatcaatcacagtgacggaaagctatactagcccccaaatagatcacgtcggcgtagacagcctgattagtctagtaatacatccagcatcgagattctatgccgcaaaaacactctactgcccctcaccgtctgactcgtatgagaaatccctaggaacaggtgcatcctctacgccttcttcgtcctcatccaccgccgtcagaacaccggcagcagcggcagcaccgcctgacgtggctgcggatagagcagcccgagcaccagcccgttgaggcgtctggagagcagcggttccaattgcggcctgcagacggtcttggagggtttcggtcggaggaggcggttggcgagcctctttgctggccttcaattcaatgacctcgcgaggctcgtcaggttgcttgtcgagaacaacgacaacaccaccagtgggctggagttttgttagcattggattcattagcacaaataagaatgaacataccctcttgaccggttcataccgcgggtcagggaaagtgagatacttgagctgagctggtagtacccttgacaggttgtccagctcgtacccgaccttctcccgctctgccttcttcttctgcacatctgcagcaaccttctctgtctccttgccttcttctccctcctctttaggagcatcatctgtgtccattgtgtccagcagctgatcagtagccttgggtgttgtgggcgcttggtcaatgtccatgctctcacggcgtgcctgcttctcccgacgctgcgcgcgacgcttggcctgggcagtggtagaaagaacagcagtcttgaccttctctggggcctcctcggtcttcacttgttgctcaggggggtagtcgaagagactggggcgggtgttgctgtggaacttgaagtgtgggacttcgagcttctggtcgacaccgattacggatgttggcgtgaagctaagcgacaagaagtgtgtgagagggaaccagtaccagtactgcacgaagaccgcaacacccacgataccaggcatattaaggttacccgtctgcgtctgcaggctaatagtgcagtttcggccaccagcgtcaatgataccgagagcgatggcacaaccaaacttagccatagcatcctcgtggcggtcaccaagcatcttcatcatggccttgcgaaggctggtaacacgagggttcatggcctcgttctgctggacgagaaccatggcaagagagatcagagcaccttgacgaacaaagtcggtagagtccttgagcataggctccaggaggtcgatagcttcgtctaatccggtgccggcgcaggagataccgagcgccatggcggcaccgtatcggacgtgagggttgtatgactcggaaagcagctccaccatacgaggtacactctggtgcttgcggaacaagatgaatcccaagctgagcacagcaactcggcgcacatcgtcattaacatcactgacagcgacatgcagaagcttacgaactgccttgttgctgccagtgccacagtaagctagggcaatggtcatgataccaccgtagcgcagagttgggtcggggtccccgagaaggccgttgatgagctcgtcggcagcttcctggcgtccgaacatgatcaaagccatacccatagctagaccacgaacaatcttctcgtgctgtgtctcgtgtgcgtactggatcatgtcctcaagagccttcatgttaccggtaccaagcatgatgagacccatggcgagaccgacagcctcgccattgagagcggaatcggtgtaaagaacgctccgcaggtcatcgtaaatgccttcgtcgcctgtcgccatacccgcaacaccgagaccaagagcaccaccatgctgaaccacctcttccgtggccttcttgaaatggtcacgaatgatgtcaactgccatcccgccgtggttggcgtagatgagaccaaaggcgtaaagggaaccaccttggctgtagacagaccctgagcccccaactccagcaatgtgttcccggggcaggtaaggctgtaggagcttctgaccttggctgaggttgccgcggtgaatacagcccaatgcagcagtggctgtgaacttcgaccaatttacggccttgcccagccactccaggttatcacggaagaacttatcgtgagtagttcctgcatgcatgaacgcatttgaaagtgtcacagcggtgtggaagatagaattgcgagcctcaaggctgtcacgaatcttgttcagaatcgcgatgtcagccttgttgttccggtataagaattccagattcagctggatggtcttgattccatcaaggatcgaaagaatgttcttgaatgcagtcgccgctgcctctggtagttctacatgtttatccgagggccgggaagagctcccctggtcttcgagtaatgcgtcagactctgttggctcgctgtcctcttcattattcttttccgcctcgtcttcagggacaagttcagcaatctcttgccgaaccttctgaaggaactcctgagtgctgttgtcgtaaaggtcgaaagaaatttgataggcaacggcgagagatcgcgcatctcccttctcaacgagctggcgaagaatagcagaggccatggagtgttcattaagatagacaacacatttagcgattgagaagaagtcgggtgccgggatttcattaagaagttccaaaattagtttgaggatctagaaaatgaaaccttggttagccgactcagctaaaatggtagatatatttggtgaacgaacctcgctgcggaacgctcgttcttggacaatgcccatgcagatatccaggacatattccatgagctcctcgctaccatgggagtcaccatcttcctgcttttcgtcgctactggcgcgaaggatggccatgcggagcacatccaagttctttgcctcgatggcgattccaatgacttgacggtatcgcttctgtctgaagcatgcttcaaacaattgctcaatgacggtctgcagttgtccctggacaccacgcttcaacacgagagagttttcctcgtgctgaacgctagtgtcatcgccaccagggtgtgcggcgtccacaccgggaacctccgcgcgagaaagtaacgatttggaagggagtgcggatttggaaaaaggtgtaataggagaagtgaggctggcggatgtgctggtggcaccgtcgcctgatgctgggaatgcagtgtttagattggctggttggtcacccgcgataggccgttgagcggcagatagagagacaaaggtatcgacacatttagctacatggcaaaacatgttagtatcaaagagagacatgctgtggatcttcttcaacataccgataatggtctcctcatactctccgccgttttccaacttgaacagctttccagcacctagagcaagaaccatactctcgttatattcctgcagatgataatataccttcgatgcgactagtgctgcaaggccgcgttccggaaatgattcatcttcgtaaagagcctcactagatagatagtcagcaggggcctagtagccagtcagactcgggagaaatgacgcaaaaaccgagataatgcttattctcacgagtctagtcaaaacaaactcacatttcaggaactgcgttgacaacctctgtccagagatgatcgatttgagaatctaatgtcctcaaagcaaagaccttgagctctgggtcaggctcggagaggaagccaaccaaaccggcggccgatacgagtccgaccatctttattgagagaggattcgcgtcgcgagtttctggacggaatttgaggagtgataagtgtattgttgctgttgtgatgaagcaacgtcaatcgggagagagcttagaacagcaaatcagccccagcgcagagcaaggtgtcaagggagatttagtcaccccaaataatgagaatatgacaagaaagacggaatttgattaaatgaaagagacgaaatggatgaagtgcacatacgaatggaagctgggagcagttgtcagaagctttgctggcgcgagagcaacgtcaacgcctgagcggagctgactgtacatgacgggtcacgtggacggcgctcggtcagctgcgagctgcctgagtccgcggtaaacagcccatcacctatcgagtggactatttctttctgatccgatcttagattaaaaccgctaaatagtcttcctacgccggattgccgcgagaaagctctagccatccctccggtcgaagcttggccatcctccacggtccttcctctgtcatgtcgacgcttcttcaacaatctttcgatagtaagaggctgccgccagttccggctcgaatttcaatgttttaccatgaccctcttttacatgttgaacgtcaggcaaaacacatacaacgcaatctccaactcctgatcgatgctcaaagcgaaggccttctctccgggctgcaagcggacgatagctcgaccggaaattcgaccccaaaattgtcgtctagtgcggcccgatcacaatccccttccacggtgcctgctaggcagcccacgcctaagaaaatcgggcttcgggctgcccgggagggcatatttcaatcaatatatgatctactgaagttgcgggaagaagaacgagagattctgatatctcagaccaatgaaagagagaacgcgctacatgatatccaaagtttcctctcaagaaggaatggtctggaagacgctatcactactatacatggagacgaggagagccgacgttcaaagcagctagaacaagaggctcggaatctcgagactgacattcatgaattggagaccaggctgtatgagatgaaagctaaacatcggcatctcgcgaacgagatatcacatattaacaactcggtcgatgccaagctctcttcttatactcaatctttgtctttactcgactccgacatccgaaactacctccgtgaccctcctatccaaccgttatcgcaaagctcaggcgaatctacctttcactctttgaatcccaaacgtcgcacacttgacatggcccaggagcattggaacacagaacaagtcggtttgcacagtaggcaacagcaagtggatgcggaaatactggcactagaagaaggaggcggaatatggaaacaagtggtgtccgctgttacaagcttcgagaagcgcttgcaagccaacatgcggcattatgttgagatgaccacaccaacgaccgagtcagaagtgtccacaccaacaggttataaagacgggctggtgagaagtattctggatgacttaaagagtaccactcaccgggtcgaatcacatctggagctcgctgaggataaggattggaagctattagtttgctgcattgcagcggagctagaggccctgcgagaggcaaggggcttgcttcttcccgccttcggcctcccggtgcatgaagatgatgcacccctgaattccatatcccccaaagatcctctaatacaccacgagttggaggtcgaacatgaggacacccgtccggatcagctggaaaatgacgacccagaacctccagccgatctgctcaaggatgcagaccctaatcattccgatgccaggtcggaagatgatgagccagatccgtcatggctaacttgatcaggatctctagtactattaaatgaagcagagctcattgcatgatttacacagcatcttccagccaactgcatcttttcgtcttataaatttatttctagtgttgtcatctcatatcgataaattggattgttacattatatgcccgtatctcgcatacttgtacttgacgatgtgtaaattgtgtctagttggtcttccgaattattagggtgggcggatcagcgaaacctcgcccctcgacctcttcctgcatagcacagcacaccgtaagctttgcattctaaaaacaaagcaatatgaaataaactagacctggtcatggatcttccaacagcaagcttctcctttgtccttccatctgtttacgatggcaacaaactcgaatgccgcatttacctcccgcccgcgctcaaaaatatagaatcaccaacaacctggtccaaccgcggtgccattgtcgcgcacccatacgcaactctaggaggatgctacgatgatccagtcgtcgatttcattggcagtgagcttatacaagctggctgcatcctgggaaccttcaactttcggtataatcattcattgaacactccgccacgacaaagttgctaacgaataacaaatagtggagcgggtaactcccaaggacgaacaagctggactgcaaagcccgagcttggtgactatgtgtcgttctacgggttcatgttgcaatatctgcactttctcaagctcgtattggcctcgagggaacaagtcgacccttcaaagcctcaaaaagccatcgacggagtaggaaatagctcagatatttgtcttatcctcggtggatattcatatgggtctttgattgcgtcacatgtaccgacccttgataccatgctcggccttttccaattcacgccaacgacaacctctacaaatagggccacacccatacacgagattaggaacacagcaaaacggatagccgcattgtccctggagagacttcaaataagtcacagtctggccgacgatccagacctcggtgcattgacgacatctatctcctatcttctcgtgtctccgctcttgcccccgattagccaattcctgacagcattctcgactttatcgctgaatctcaaaacagagacccctaacggcccccacatcccctgcccgcgtccagcagatcagcagagcacgcataatactctggcactgtttggggaccaggataccttcacatctactgggaaactgcagagatggtcagataaaatggtgaatatggaacgcagtaagttccagtttcggatgattgatggcgcgggccacttctggcgtgagaatggagtcgaggtgcgagcaagacatgcactgaaagagtggctctgtcagatatgataatcttgtactgttggttatttggctgttcaattatgctcaatatggtgcggcaatgataacaacctgacctcgagaccaagtgtcagactgggatatggccccaaacaggaaccttggcttttgttacatgactctctactatgatagttccaatgcccattcttccaggtattgggatcatcatatgcacatgagtgacttttcttttatatgcaaattgattggaagtcgctcttcctctaatttagcgtattgctgatatcggtacagtactgaagcgagctccgacacgcacgtagatgtatgaggttttgactatattaatccgccgtacgaccaagtagtaactatagttacccctacaggatagaatggttagaataagagagtggataactacatcatttctagaccatcaaagtcggcttataagtacccaaatcaagccccattatctcgatgcaaaaattctcaattcttcacataggatgtcaatgtttacatctactcaaccttctttgatgctgctcggactcctccattcacatcaacatgcacccctcgcaaaacatacccatctcgctgcgcctcatcccactgttgccgtattaggtctgaccgagctgtggaacgctctaaaatccgtaccgagtactccttcggcactcggatcgcgccctccataaaaccttcgtcgctgatatccaagggaacctcgtttcccttatcatctaacggcaaccggaattcataggcccagatgagattggacaccgccaagaagagcccattctcagccaagtgaatccccgggcaaatacgacggccagcgccaaaggtaaaatggtcgcgggcgaagatatcaccacctgcggcatacaccgcagaacgttgcgggtgattaaggtagcgctcaggtctgaagccaaagggatctgggaagcgttcatggtcccagtgcagagcattcagattagcgaggagaatggtacccttaggaatctgatggtcgcggtagtgtacgtccccatccgccatgcgccgaagccccgtagtagcgaccggacatagccgcagagtctctttgataacagccttgatgtagggcatttccggctcatcggccagggtcgccatccgcccatcacccaggacccgcgtcacctcctcgaatgcccgtgcctgtgcctctgggaacattgccaggtaccggatcatgccattcaacgcgctggcggtcgtctcagctcccgcttcggggacagcactggctaaccatgagatactctcctcctctagaccatattcgcggtagtttgactccatgaggtccttggcaaaacactctggggcattatctgcggcgatacgttccttcagattgttccagtgcctcattttgttgccgtgcatcttttcagccatgaacttggcctttggccacgaggggaacaagaaccgcggcagccagttcagaggtgggaatacatcaatccagaagactccaggactcagaatgatagacagcattcgcatgttgccgtagacgtcgcggacttcctggcagtcccacttggggattcggagcccgtatgccgatgtcatgactatggaaaaggtcatgcggcggatatgtctgtagaagtcggtgctattgcgcccctcattgttcgcttcatggctgagatcccagaggagttgcttgatttcaaactcctggcttgggatgaatgctgcggatgccttggcgttgaggagctgtttcagaaacgcgtgaagccgcttccattttgtactataagtcatgggcagcacaccctcacccctcaggcagaactcttgtgcgatgggcaggggcggtttgccggatgtgacggcggcctatgtgccaattagcatctagttctgcttcttgtgctgttgggaaggatgcaagtgtttggggatggaattacctgtctatcaaagacttccttgactgcatctgggctgttaaagaacacccagttataccaacccacgcgaaccttgaatgtatccccatactgcgccgcccagcggttcaacagctgccgaggccgggcgggcaggtccagcccaatgccaaccaatggccagcccgagggaccgggtatattggcaagaggcttggtagtcttgcgagagtaccggactgtccaaagtagtagttggaagagtaagaatgcgcaggcaaagccaaacagtacagttggcctggaaattgcggagacaaagcgaggggaaagaagcagttccacagcatcagtcttgtaaaaatccattgcgatggtttttataactccttacagtgggttgattgaagaagtaggagaaaattggatcaaagtccaagattcctaggagttcctagagtatccttttatgtccttaataacgtgagcactgtagcacttacttcaccaaaccccacaaattcatgagttttctcgtgaatttcaactttacttgtccaagcacgaaagcatcatcaaccaaatggagggtcatgtccgttgggaatacggccctcctccgccctttgacaaatccccgagcattactgacgacgtattttccgctccatattcctgcatgtgcatagtgcttgctttagctttcagagagccagtccaattagcccgaggaaagcagaacatcaaccaaatcgaggcttatgtccgttaggaatcccgcttacttctcacccttcctatatccacgagaattgatgacgacttactttctactccatatccatacatatgcatatcggcctctccgtcgttgaggtggttgacccactccaacagggaagaaatgctatccatctaatcaagaaatgtccgttagaattacggctccatctgcccgcccatatattcacggaccttactccgtaccaacgaattatattctgctccaaatctctatgtatgcatatctagcctttccgaagctgacgtggctagtcaaaggtaggtgaaaaatccgtatgatcacttagagacacttgggatatactaatgcataaagtagcttccacctcgaatattaacggctcagaaaagcataacgggtatcatgaagaagtagatgtacatttagtgggtagtatacctcatatacctcatatttatgagtaaacaatgaattataattgtgtaatatctagattctgtgttctagattcaagcggaaggcatgcatcccaattagggttaggtgaagccgatgacgtcactcttttgatatacggtaagggtccagtccagggtcatgtacggtatggtacgggtatggaatcgttctgaaatttataccgcgtgtattgttaggttataaaccaaatgtatgcaagcgttgtacttcgcataagcacgaatgcaactccactgatagacacgcggccgttccctagtcgtcccgttaaactggggatggaacctatattttaaaatctgttaacgaagaaccccgagcactcaaacgggtttatcgtgacgccaaatcgccataattggtacgaggagaaacgcagctcccactatcattgccattccactgaagatctgcaatccaaggaagccgttatctcccccatggccctcaatgagacctgcgatcggcgctccaatcagaacccccagactagtggcaaaccactgcatacccatgcgcgtcccaataaccgagggtgttggtgagacgatgggatgagcgatgaccaatgggttggcggagattaataccccggagaagatgccaaaaaggacacagaatacgatgaaagcggggatagagtggatacctgtccagccgaagaggatcacggctgaggcgaggacgctagtgagcagaacagtgctggcgcccagatgaggggtgagcaaggaggagccgatacgaccgaaggcggagcccgcgttgagaattgaaaccatgtagaaactcagctcggtggaggtgtgcagggcaaccgaggcaaaggtgggcaagtagaagagcgggatgaagtaggccataaacatgaaaaaattggcgaccgcgtaggcattgaagctccattcccgaaaggcatgccagtggatgagccgtcgaggggcaccatggcgagctttggtggtggccattagaagggggatggcgatgcacgagcaggccagctggatgaagcccatagcacgcactgtccacggaaatccaattgacggctgaagtcggataaagatgacggggaagataaccccacctagattgtgtcgatgtcagatttggtcctggtaatcggaacgaagaaaaacgaagagtagaagggtcaaatgaccgtaccaacactggcgccggaggtgactagtccaacagcaataccgcgtcgcgtagtaaagagggtggaaaccagagaaaggctaggcacgtagatcagaccactgcctaagcccacacacactccttgcgaaagcatcacttggtaatattcggtggacaaactcagcatcatgagccctagtgtagtcaagaagcaaccggcgatcatcagatgatgcaagtatccacgatcgaacaggggaccggcaatagccccagtggaaatgagtagaaaggcactgacggtgccgacccaggcgattcgggacggagagctgtcgcgcaacaggtcggattggtagtagctttgaaaggcaccaaacgcagtcgagaatccccatgtggtgacgaacagaagaaatgaagcaaatacgcccgaccaggcggccaggccaccatttggcggcgcagcgggaagactagactcctgcgtaggtccattggcccccatagcgattgatagccaatttcgtgttttttgagatgcggagataaagataaagagaaaagaaacagtgaattatccaacatatttaaatacccagcccgccccttttcctcgcaggtcggagaatcccccaggcgccagattcggaaaagcaacaaagaaaaaagtcccccgaatttgtcatcatgcagtatgtggacatccttgtcacctgcaagtcacataccgagggccgagcattaatatcttttgcaggtctgtaatgccatctacgcgtttgtgtgcaaacacttggctctccaatcccgagaaggctattcctggccaattgattattatctgtacctggcttggggcttcacccaagcatgtcggaaaatacaccgacctctatcggtctattgcaccacacgcccggattttgttgatcgagtctgatgtctcgatattggtgagcagctacgcacgccaacgtcgccggatccgacctgtggtagacatcgtcctggagactttagcagagacagaaaccagctctgacgacaacgcaccgcgaatcctactgcataccttctcaaatggaggtaccaacaccgcaacccaacttctgatcatactccgtgaggtcgcctccaagccgctaccattgatagggctggttctggacagtacgcctgccaaggggacatactggaagtcgtacaatgcaatggtcttctcccttcctcccgcgtctcgattcgtgggctcaatggtagtccactgtctattggtactactgtacacctggatagcatgtggaaacgaaaacccagcgagtctgatgcgtcgtaccctcctggacaaggatactgtcggccctgcgcctcagagacccgaccccgaagctaggggatacatatattacatgtactcgaaagaggatcgtctgactgactggatggatgtctgggaacatgcagggaaggctagggaggaggggtggaaggtcaaagaggtcgtctttaaaggcaccggccattgtgcacacatgccctttgatccgatgcggtatacggagtgtgtagagcaggcatggggtgcaatcagcaagcctgagtccaagctgtagttgacttgctgacctatttttgatcgtgtcttccttatatctatgaagcagaggtgggaatttgtggaaatatcaagatggttcaaattgcagccacagctcatttattgaagactcccaattttcactaagagaccacaatcttactccattctacacacacaagtagtaaggaatcttcctcggatcaatcgaacgccagataaaaggcataccctgcgataaaccatcctcgtcgaattgccttgtccggatttcttcactgatagctaacatcgtcgcccgaaacttcccctcggcagcatgaagatcgcttccagccgggcctaagaattcggtctcccagaacatatgcggaaggtttcctttctgctcatccaacaatggtcggttgaacctgacgaggagcgaagcttgcttcagtgcctcggtctcgttatgcagccacgggatcagcgattcgatgccccctttagtctcaggaagtggctggttgaaggaggagggatgcaacggaagcacacccagggcctccccgacagtcgcaccattgagtgcatgatgcgcaatcccagagaggaatgccatgtgggagagaatcgagacaagatcctcgcgcgcgaataatggggcagggaaaaagtcaatgacttgagcctcactggtggcctccatgatccaggcttgtagttcgtggtcgctgcccatcagactgctcttggggtaggaatattccacgaaagaacgagtgaagtcttcgatggcttgcaccatgggtgccacagtctcatagaatgggaaggagcggagcggaggcccatacgcgcaatctagaagaccacggtctgcgaaatcccgataaaaattcgtggaccggaagtgacccgcgtgctcccaataggcgtctgttgcgaacttcttgccggcccagtttggaaccgcgaaggagctgtcgtagaaaccgccttcattgaaaaggaattcctcaccaatgggtcgaaccgcatatgcctgatacattactttgaataattagctgcgttgaattttgaaacgccgaagggagagcaacatacagcggtcaaggtatccacggacaggatgccgcgagctcatggttcgcaagacagcctggtgcacgggctcagcgacatcatgtgtatttgctagatggtatagctgggaatggaagagatcgttcatgccaaaggccattttggcgaaaagccagtcatttgcgtcgtcccgtggcgtatatgtaaggtttttccccatgttagtcttgatagccaatggaaggaaatcgccagatccaggatggatatagaaatacgcggtacaagcggctgtccagcgcccaggagtcttggggtaaggggcttgataggaatggtcagcatagaagagacgtccttcctggtgtagatccgccagtgttcgaccctcagccaggtgttgcaccaccccatcttctactggaaaagggagactgccaattctgggatgtaggcgtcgaaccacgtagggattagtagaaagcctctccatggagaaaagcagatcttgggtccagttggtcagcatcccgggggatacaccgtccgggagtgaggaggcccattgatctttgtaaagaatctcatagctggagagtgattgtatgccccccaccttatatgattagctagggcccattttagacaaagggacttctgccggcataccttaatcagtgctgcagcggccttgtccaactcaaggtagacgttgttggtgacatattccacatctttgaaccacgcaaccctgtctcgggctaccattgcttctcccagaaccccggtagggaagaaggatgtgtttccgagtaaagggggcccatagatatatcctgctcgagctagacgaatctcgtctactctttcccaggacctagtgtcaaacattggaaggctgtacttaggaccattgtcgtcgggaagtgcagcgaaaggtttcagaaccgactgaacggaaataattggccaagcaacagcattgccaatatagaggaatgatagcaaaagcttataaatagggaagagtgtcattttatatagagaatcaatgtcgttgtcggaaaagaaagcaggaacttgacatttttgatgggaatcaccgacatctatattcattccttgacttgaacgtaagtccccccctcacaatcagccccagtgaaactcatgccttctattttctgacattctacatatctccgctctcgtgaacggccgtgtttactccgatctatgacgaattaccagtgtgggcccagctggacgactcaacatctagcagtcctccaccgtccaaattaaatgcatgatgctgtaagtaagctttctgattattacgaggtcaaatatatttgcccaattgagccgtctgtctgaacaagataaagaaaaatgaatttttattcccgtacattatctaccctgccagccatgcacacaatgcacaaggtaaggcaaggttcctaatagagtcccttccccgatacactagaatgttgtcatttaaatcaagggtaattacaagaatgggtgcatgtctccttgaacaaacgtagattgctctctcattgattctcccatctaatcaccaaaacaatgaatcttgtcgccattatctgtttgtggcttaccgttgtctactgctatcccggcggatttgactgggaccaagctgctagatatcaccagcagcaagtcctttgtgatgacaatgaccgaggatttggcttgaacgagccgtttgtcccaattcccgctcatattctccctgagaagcagcactttatcattgacggatctattcatttctacgaaaagcatctcaatggctccggcccagacgggagctaccgtcgctcatcttgtccggccgtgaattcgttggcaaaccgcggatatatcaatcggtccggaagaaatatcacttatgctgagctagcgcacgcagttcgccgagtgtggaacttcggggatgataatgtgaaaacctctttccctcaaaatcaaagtataattcgcattcgtactcctgctgacttgtgggggtagagtatgttagtgctggcgccaacttttgcaatgcatggatggcctgaaacgattgatttggattacttcaatgcatgatacccatagctccccctggttccctcgtgctagacactaataagtattcctaggatgaccatgttcaatacgtgattaattgcccggccgcaccaacccgcaatgaccgcgcagtgggtgacaacattaacatcaacatgactctcttcgattccctgttgtccttctccaaggatggcgaaaccttgtccctagaggatatggcggagcaccatcacctacgccacaaccaaagtaaaatcgagaacccggacttcatctttggcaatcaaggagcaatttgctcactgtaagtattaggtagtggccaatactccctaactaccctaggcctaatattcaagacatacgttctgacaaaggcagtgcccaatacacaaatatggtcggggttctcggcaagtttggtaaacatggccgaactaccctattcattgacgatgtcaagactttctatcttgacgaggacattcctcggaactatgagcgcagagaagcacccgtgagttatactatgcttgtgcccttgtaaatagtatccttactaaaagacatgacagcattattctcccgagtcaaatgcaatgattgaccgcatggcgcatcatgttggctacactattcaacgaccgttcccggagggggatcagaatcccggtgtggacatttgtccgatgaaggcgcgattccagcacgaggattgtagctagaattgacaataatctctcatgatggtctggaagggatgaaaaactatagcaagcagatcagattgtggagtatattgatgtggcgaatgaatgagcggattattgtgctgtatacacacacctatgaggaaactttggcccagtctagagtaattgtccgagcacagcctggcttacacctataatattattagataggaggataacttgacactaggtacccatgcatgaagcttctaggaatatagtttctatgcgcgacagatggggcgatcgtagtcccggagggttaaacggtcctttctacataaggaccatgcaaaacaacgagaatgttccgaataagattatggtaactaggtatgcatgtcatcttttagtaaggtagcatacgaaaacatagcgcatctaggccctaaacatccagtggtaaaatgtcttatcttcttcccacataatacatcgaaaagcagggatcactacttagcgtacgagtacggtatgacaatcttacattcactgcagagtagcatcaaatgggcgcaattgcggatgcccgaagtgggccctgcatgagtggacgacatgcagggtaattatcttgattagaggacacctatagggaagtgtagttttgatccggcatgcaaggcgtcctctcattgttaatgataagtatgcaatttcacataaaaaatctcaatttcttgtctaagttgcgggctagaggctggatacagaaattatcgtgctcaagagtcaaatttcgatgatgttctgatatgagccagtcatctcgtctatagctttcctttggtaacttcagcgagagttctttgcgtatgcttgtaacaccaggcaggatccgccatatccgcccggatcccgtagttctcctccgcatcctccaacactgccatatccagggtggccacccccattccttcggtggaggtacccaaacggaccaatgggccggcatatggaatcgtgatttgggaaagaccgcagtagttcttgcccggtggtccgcctgcgttggcaaagaccacggcacaggtgttttcgaatgtgcgtgctgtcaaaatgctgtccagaaacagggacggcgcggacgggttttgccgacggcccgcctcggatgcaccgctgcgggtccacagagtgggaacaataataatcttcgcaccgttggacgtgagctcccgccatgcctcggggaaggccaagtcccagcaaactagcagaccgaccggacctaggggggtttggatgacctggtgggggctgtcgccggaagagcgaaggtaagctcgctcagttgggccccacagattttttttaatgtatgagcctagtatctccccagtattggagatgaagaaggtagcattttccaaaatgggtgtcgtgggtctctggtcggacttgtttatctctgtgacgtgtgctgaagatgcagatacgggtcggacgatggacccagggacaatgcagatattacattctttcgctaaggcctgatatcgatgcaaatagacctcccaatcctcacacaacgaggcaaagcgggggtctgtggggatccagttcgtcaagtgaaattcaggcaggacagcgagttgacatccctgagctgcagcctcacgaatgaagtttacagcgcgagcgaagttatcctcgggcctgaggggctagaaggtcatgtgtcagacactgaaataataatatggttgtcttgcattttccatttctgaagaattgtggatgtaatcttgccttaacatacagctgtattacagcaatcttgcaaaatggcggcatgatggttacaaaaagaatcaaaatgatcaagaactaaaagaaataacgaaatccaaggggcgagatagggttgcaaggatacccgtcttctttccaaaggttgcgaatttggatttgtcagaagtgggcccccggatattccgttacgggtactccgggcgggtactccgcatagccccgcgtttcaaatggtacttttgtattcggtttctgttaccgtccggtatgtaatgtatcatacctctttagtaaataccagtaagcaatctcacagatccagttctcaaataccgggaagggccgccgccatgccgatatagatctcaattccatattggccatgcatgcactttcaattccccgtttaggttgcatcaccgacgtacatatgttgaatccgtttgtttgactttttttcttatcttcatttctccccttgctttttactaaaagccttggtcatgatgcatgagtaactctatacaggtttctaggtggatttcgggagttgctttggatataatgacggaatatagtggattgaaggcattcttgctcaccttggaataactcttgcgccgacgaaactgataagatttctcatatagcttacttatacgcagtgattgaccttgctctgtgggtgtcaccgtgcacatccttcctcgagttcaaagttcaaaagtcccagctcattatcatcatgtcttctctccgtctagcaatgaccagtctgttaaccgggttgcgcccagaggtggtggaaaaacttcagtcggacaagactggctttcctcaaaagcaacatgtcttccatgcatccgacgttcctaaatggatgcaatgggacccgtttatccaacgaggataccgaacccagctgaatagtttcaagcggtgtttctggtccctattctatctacataatgaatcaatcaacacctggtcacacgtccttgcaggaatttatttcctcgccgttcttctcgccaccgactattggatcgcccaactgggactcaaagtgccattatcagacatacttgctattcagacgtatgttgccggcactgcagggtgtctcatattctccgtcagtctctccgttaatcaatcctttttacaaaatccagaagtacttaactgatcctcacaattctaggctaccttccacgcaaccaacgctcattcgcctgaagtcgctcatgccttcctcaaactagattacttcggaattgtgctcaccatctcaactacatgtatctcagtcgcttatttcgccctgcacggagaaccgaggctccaatgcgtctacattttcttcactgttctctgcgcagctatggtcttctgtatcacacttgatgtcggtatggatggtacacgtgctggtccatggaggtaagctctagcataatatcttctcatgtgttattgcagcatttcagttcaataacacctgttctttcctcacacagagcaactgtattcacccttcttgcggctagcggcctagcccctatcttccacgtcatctcgagcggttcccctcgcgatttcatccgcatcccttgggagactctcatagtaacctgttcttcatacgcaattggcacagtggcgtatctcttccggtttccagagcggtattggccggcgcaatttgatattatcgtgagtctgattcatgttcataacggaaagaggatggtttgggattaatgagaaatatagggtgctagccatcagatattccatattttggttgcgtttggccaggttgtgcatctgttcggacttcgggatgtgcttgtaggaatccacctagagtcgcatacggtgtaggcactcagtagtaccgtaccatacgtctcaatgaagagaaagtgtgttttagaatgaggtggcagtgaagagctttggtagaatgtaataattcaggaaaacgaacgagttctataaggccaacccggatcagaaaaggatgctgttcatgtcacggatagttagccagatggaaatcaaatgattcgggcatggcaatttcaactatcagtcgggcctgtcaaacttcatgcattccagctaactaaatcaatccatcgcacaaatgtcatcaatagtgtccacgctttgggcaagattcacgaggtcaggtgctcatctttcagcttacgtaattatcaggtgatctgggtgtttacctgattatgtaagactcagggcgtgctcaattttactcagaggagcaaaagcggcaaggaataagcactaaaacgcaaagggaaaggtgatgaccatgcagcaatgcttccccactgtccgagatgaggttgatcgtggggtgagatcatgtcttctgatactatcggttatagaagaaatattgtatatcgcacatcttttcctagagtagtagaataatgtatggcatgtgatagtgaaatcgtcataaaaggaaccaagtggctcaaagggcccgaagaaaatggctaccattggccctcgtgacgtttgttaggtcaccgccaaacttgacttgaatccggggaatctctacttttataactcgtttactggtttcgtttttattataatactttcattccggagctaacagatctccgcatttcacaccccggctgaatggcttgcttctctaatgcacaggcctaccatgtcggtgttgggcgaccccacattagttcagtgccatcatgggcgcaaacactcccaagaatactctttaccccaacccttacctccgcgaccgctctgcaaaacgatctccatcccaaccgtatcgtcgctcgtgaaggattcgtggaattgggccggtgatactctgcacacctaccgtgatggtctctcgaaggaacaacggaaacaaagggcggacatcgaggaccgcaagcaagtcctgtatctgaaaataaagaatgtatgtacatgcggtgtacctgggccgagcgatcgcatctgcagggtgacccctttctaacacttgggctgcaggctgtgtcgtacgaagaatggcgaagttgcgccagtgaactggacgaactagaggataacaacgcttggaagcagacactcgagtgcaccgaatatgatcctcgtttggtacaggatcgtttgcgacagttggaagaggctcgcatcagctgtgatgtaagccggatgttgttcttggtgcgtactgcgctgagtcgggacctggcgcatatgagcaatgcctctctctatcgccattcgcatattggtacaaaggacttgatcgataggtatatcaccacggctttggatactatcgctacgctggtggatctctcggtgcatgatcgctgtgatgggttggagctgaagtatatcctggaccagctcctggcagctcgacaggcatttggtcgcagtgctctccttttctccggtggtgccacttttggcatgacccatatcggggttctcaaggccctctatgaagcaaaaatgattccgcgaattatctcaggtgcctcggctggtagcattgtgtgcgcggtattttgcacgcgcacagacgaagagcttccggcgcttttggatacctatgtacatggggatttcgacgttttcaatgaaaagggccaagaggaaaatatcttgcagaagatgactcgttttttgaagtttggatcattttttgacatatctcacttggcgaagactatcagaaactggctgggggatatgacttttcaggaagcatataaccgcacccgcagaatcctaaatatctgtgtgtcaagtgccggcatgtatgagcttccacggctgttgaactatatttctgctcccaatgtgttgatctggtctgctgtgtaagttcctcctttttcacatcatcaacccatttctaacgtctttcaagcgcggtatcatgctctgttccttttgtctttaggccattcacgttgatggctaaagatccgttgacaggggaaccggtcccctggaatgatcttcacaagcagtatattgatggctcggtcgatggagatttacccatgacacgcttatcggagatgtttaacgtgaatcactttatagtctcccaagtgaacccccatgtggttccatttcttccaaaggaaacaggcccacaggatgcgacaaacgacggcccttcgttcattcctcgatggatgaacatgatggcgcaccttgccaaagacgaggttctgcatcggatgaacgtcctctcagaacttggagtctttccaacatcaatgaccaagtttgcctctattgtgaaccagaaatatcatggagacatcaacatatacccagaactcctttcctctaacctcccaaggctcctggagaatcccacaacggagttcatgctttcgtcatgcctgagtggcgagcgggcgacatggccgagactaagccgtatccgaaaccactgcgccattgagctggcactcgataatgcaattcaaaatatgcgggcccgggtggccttcagtccaagtcaggttgatctacgtatgccgcaccgtagtcgtcactcgattgactcggcagacagcaacggaaggggacgttatcgggacaggcgaagagggtcccacagccccgaatttgaaaagaggcagtcgggtgggcaggaactacgtcggccagatcacgaactgagaaaggaacgaagcactgtttcgttagagaacccgcctctctcgcaatcaagcgagtcaatcttcatgccaacccaaacaaggacccaccgccgtacatcctcagtattcttcagcaatggagggatgttcgatattgggtcaagcagcgatgacgagctcgaacgatcatacatgcttcgtcccaaactcgcaggccaccgaacgttctcagagtcatcttcgtttggcagagtagctccgagtcacgggccccgcagccctgtccggtcccgacgatcatcattatcctctaacccggcctataatttctcctccacggctcgtcgcagttccccaaagcaggtttatacgccgtcggctcgcgatttctccgtgaccataccaccttcatcccgccatctgctcagtatgactccaacgccaacactccttccgagctcgcctgagcccctcacgcgcaagcggcagaattgaataatatacaagcaattgtgcagcttacttgatcctttcctttttcgggagtcacaggccgcatactccggattcttgacacgtacgaagtacaagctcgcccctcaaattccccgaatttcgtgtacgatctaggacactcggacaagaaggctttttgattcttgccgattgttataattccgtacacctaccgctaagcatccactacatctcttttcggtcatattccctctctttgtctatcgttgtctccgggttggtggcatctatagaaaggggtgttagtctatgcaacccgatattatcgtactagaccacctcttgcttatcccctttgcatatcgaatctgccggatttgtctgtttcctttctgtttgctatctacaacatatgacatgcatgcagcggttttttgtttttagcggggacaattttcacgtatacacactatggggcgttgaatcctcagatgaaacagtcgaaacctttaaggggctattcgtagctaattttaagttaataaagatatattattctccattcaagggttgatcgtgatacccttctccaccgtcggcgctaatggccctgaagctaagctatttcccagcacaaagtcccgggaacatgccgctgagtgagcttaatgctgtagccacaaaggaatgcttggcgttcttgaaaagccaattagaaagaagctagtggaggtcggaagcaaatcaatatcaggaaacaatcggcaaattcgcaatttgggtgatgggtcatgtagacacgcgtttcacatgttcatgcaatccatggatgtgcaatatacgtcgatatgccgatagattgaaacgaaacacaaaacaggtccatatttttccgtaatcctcatgttgcaagatgttgcaagtgttcaagggaaaagtggaagtgtccactaccaacgtccagtctatatcaatcacggggttccactgtggaccctttccccagggctgacgacgactcggccatcaactaatgttccaggccacctcgaggatcacgacctatggttctctactccgtatggttctcgatcttttgcagaaagaggcgatgctttctatattccggtggagtatatcctagctcaaccttagggagacttcttgagttgttctgagcgcctctcctgcggatccaaaatcagcctaaatgttctcaactcagaaatattggaacaaaggtgttccaccctgccgatcagtcgttaaccattggtccctatttatcaatcggtgactctgttcatgttttctagccaccttgagtccacccttgtccgtggacaaccagcgcatcctgctaagcaaagtctggcgaagtctatgcacatgaaacgagtgaccagccattctgttacggataaagtctaatgacgtcggaaaatagagggatgaggacatcatctctgacatgatgtgatacgacctcaaaaaaaggggtatcttgcaccaggcgtcctgaagtcgagttagagccctcggccgtaccacgttgcgaacctgttatgtacaacggatgtgagggaagcgattgatacggtcagaccatcctgacaatcatcgatttgcttttacgttattctgcacgcggaacatgatcgtcgcactaatgtttggtacctggctgtggcgtctgtagcccaactgtaccgtcgatactttccttgtcgaatgcctatgacaactttttaccttctcttacgcgttggctgaccagcaaacgatccagcgaaaatacctcaggcccaggccatgtgtagagctctgcccatccacgggtgctgtctacctggtccctgacaaccctagcgtcccccaagttaagatcgacaagcccacttctactccgtaccgctttaaggtatcatcgtccggccagtccaccttccggcctgtccagcctctgagaaagcaacaacactgaagtcatggcgcgatcacggaatccatttcggccttgcaacaagcttggtaaatcggcagacttataaacccgtcccagaccctccatagtttttttctccgaactataaaatctgtccttgatacaccacccatatatctgatttctgattcaagtttctccattctttactttgatatatcttccaattaatctataccaatcacaatgaagtacatcagcatcgctgctatgggcatgatgggctgcgccctcgcccttccccagggtccttctcctttcggcaccctgccccagggtgccccgcctttcgctggcgcccccagtgatgcgcccatccccagcgaaactgccaccggcactcctaccggcattccctctggcctgccctttgacaagcgccagttccattctggacccggtcatcaaggtcctccccccgacggacctgctcctagcggctccccaactccgactggtcctcctccctcgggcttctcgagtggtttccccactgacttccctgcacccaccggtctccccttcgacaagcgccagttacactcgggacccggccaacaagggcctccccacaacggacctgctcccagcagcttcctgacttccactggcactcttccctcgggcttcccaagcggcattcccagtggcttccccactgactttcccgctcccaccggctcccctcagtaaacactgagtagctgagcgaccaagtggcttctcgccatctattgctacactgaacctagtcttggacctctgatatgaattgatgtttgatgtcacacgcaagacagctttcgcgcctcgtgtttgttgtacagtggatgtgagggtctgatgtattgggagtagttgactcaattgcccagtactgtatacattatagggaatattggttatatcatgggaaagattggttgggatgcttttttctttcgttggattcgggtctgcgagacgatttattgtttatgaattgtacacaggctttttcgtcactttttggatttgaagatattgtcacttctctatcaatacacactcgtttgcgctacctaggtatcatgatgtatcagtgtcaaatcaaaactatagtggttagtcttttgatgtgacaaagtagttattaagtggccagatgattcaatcacagagctcattccctatcaaaaaacacgcttgtgcagatattccagccgccaaagttgacttatagtcatatattttactccatagagttggtaaaagataacagaatctgttacgcacagtcgtatagctcctcaacccggtatcagagacagtttaggcaaggtatctatagatacttcaagctcgctagcctatatatcccacctttctctactgaagcttgaaatgctttatactaggcctgtacttctgtgagacgagaggcaagtagaaatatagtagatatgtatcattgccatgtggttgagggaattgtctcattttgaatgttttgtttgacgtaggttggggctgctgttcgtttccggtcttgaagattgtttgtttacgtatttccttttttctcaatctctctgccttctatctgtcagtcttatgtatcttttggcttttccttgggcccaaggaaaagcagagaagagatttgtatccatctgtaaagcacacgtggggatggcgagagcctcaagtgactaggcacatatccatttaggaaactgtgaccccttgtagatgtctcaataaccttaagcaaagagtatctgcggccatctccattctctttgctttctagcggccgattctatgctgcattcacgatttcacattcgaggacaggaaggttatggtgtagggcaagcggaaatgtacctacaaagtgaaagtaatgatagccagtccactctgtctacaggaaagggacctgtgacctgcgatatctcaacaggatcattgggaatgtcagctcggccctagtcaagtctcaacagaggtaggtgtctcgagcagcctgggttgctataggttccaaaccgagtgctcttgcttgtgtattctagataaagatactaaaacaacaccattgcttcacagggatctaacatgtactgtatcgggtagtctatcgtattggaaccagaattcatgactgagtaccggttgtattgattccccgtttgtttgaaacccaaagatataaaagccctccaattgcttgttactgtctgtttttcttcttctcttcaaaacataaccttccggacttatcatccacactcaggactttgatccaactatccatcacttccatcacatctatctatcaacaaacaaacttgatcatggctccagtaaccgataccacgagcaaagccaatgggcctgctctacccaaggccaagctcagaatcaagctcaatgtcaagcccccggccaaggctgaaaccgaggtagaggccctcaaggccagtgacgaggagttcctcttaacccttctcgataccgtgaaggtcagttatctctcactcaatacctagctgctggactatatggtatactaatcaaagctcaccacaggtcgatcaccaggccgcagccaacacccttggaatcaacaaggcagcatgtcgcatgcgatttattcgcttgcaacagaaatacggcttcaagaagaagggccccaaaggtactccacgacgcaagaagggagctgccatggtcactcctgccaatgaggccgatgtcgccgaaggggaagactaatggggaggaagccgaggactgagacgaggactgagatacccggtcgcattggccacaactgtggtgttcagaagaagcctggacgggcagatgaatgaaatgatttcctactctcacctcactgtcctatcaatctgacaatctatggtcagatctacgtaatctagtagcgccgtagtcgagtgatatcgtgatccaagagatggtgacacacatggaaaccctacagtagacccagatccctccaatgtcgcgagacacagtggaatgaagcaatatacacatgtattctgagctcatctaatcccattgtctagcattacgatcgtagatgcccgaaaggtcaggcttccggcagctagctaaatctagcctgctcattttgcttttaaaagtaactcttgtcttcatttctattattcacccttcacttatcaacttacttatctgaaagcttcacacttactctaactcctgatcctatgattctacacctcactatcctgccatgagaaccgtacccagcattacatgattcaagcccgagatctgtatgcgtatagaaattttgaggttggcgatgaacacggtgttcaaggccgattccaaaatttctttggggacgtacttaataccatcttcgagttacaatcgaccatcacagcaaacatcaacctccgtttcgcagattttaaatgtatccagtctacataccccggcacacctgacttgatactgaaggacaacaatcacaccttaaaggtcgtgggggagctcaaggtactgtggattggcgagcatcagatgaagatgacacgaaggattgccaatgcgaggcttttgagagagatattggcccagcctattatgtatatgaagcatctgggctgtatgtatgtctttctaagcacatatgaagagacgatgttcttgcgacaagtcgtggacaataatggcgcatggaggattgagtattctcatgtgatcttgtcgtccaccacttacgagaaacgcatgatcacttcccctgtttctacgaagcaatattttttctattcaggtttgaatgcgttgaatcactatataaaatacacatttctctatattacctcgaccacactagagcgcgacctccttgccatcagagtacgcatattcaactatgcccatacagctaccccgagccccagcctgaatcgacatttcggataaccttgtgctatcctcaaattgtatcttaattaacagtcgactatataagaccgaatagcgaacaaaagggagagactatgaagtgtagataggaacccgggatcaaagttgaaattaaactaattctttaatgctcgaggggattgtatgatgtgagtggatgggaattgcagatgtactggctatgagagaaagacgatagacgagaaaaaaaaaggaaataagttacagtcatacatatatatactagaatcttgaatcttgaatagtctgagctggggattgtcacagcaccataaaccgtactaaagagcatacaggaagattagccgtctattgaaagacatcgaactccccaaaggatcaggaggacctgtaggagaaaaaatattgttgccgactttctattctagtccagttaccgttttgacggaggtagtcaaatctaagttctaggtgaacaaggtggaggatttctatacgtttattttttcttatctttcctggggctcaataaaatgcttgtacacaatctcaaattctagccctagagtaggataggtatccggagaagtggaaagtttcatattaatgcgaatgtctataaatatccttaattaattagctgggttacattcaccctgcatgcatatcgtactttatgcaagcaaggaatatacattaaagctaattgacatctattttaagaccgaaagtggccgatatgcaaactaattaaggaacatttgaactgacatccctgtcaagcgcagactgcagatctctgtcagctctcagcgctaacgggcaagccctattggtcggtggtgtgaacagctacaatgaatgagatattcaatagctggcacaaggccctttttacatctcttagagtagccccgttctgagactaagctttatatcccgacgccttccgctgaaatgaagtcctctcactctcagtgtcagactggctcgatcaaagtccctggtggactccatttgctttgctttgcttttattttcagcttgcgtctttgcagggattctttggagacccctccattgcccctcaagacccttgttcgtcgtcacctggctaccagccaatccacggcctttcccacttgtttgtttctgtattatcgcagaaggatacttgcattgaaagccatagaagtctcactgctctgccgacttgcaaatttgtcagctggtccttgtcaccggttgcttgttggttcttgttataacgcattaatatcaaccctgtcctatatttcccctctattattactctcctccccccgttagacgaatgtcatcttttgcttctgctggggggcgataccagagcagtgcgagtcgataccacacaaatctctcacagagatcatggcaggaatcgttaacggacctctttctctcttccgcaagtcggactcttcaaaacctctccatgctcgttggggggacgtgtctatctctgtacccacagatggctcatggaatcaatacgaaaatccccatcgacccgtcaaagagaaatcagcatacggaccaggctacgtgcccgactgctctctgcaagaccggaattcccgcccagtgaaagaggacgatccagaagatgatgccagaagcgtctgcagtgcagcttcaacagcttcgcgacggagttcactatccttaggaggcctgcgaccgggccggctctctgtacgcctcgcttcgcgtcctagacaactacggggcaaatcacaaatggaaagagacgcccaacactccgaggaaaaacgaaatgagtttgcatatcgacccattcaacaagactacaactccgaagtggtcgaaaagaccactcagcccagcaatcgcttcaagtatattccgaccaacggacggtatattcaaagcccaggcattgaggctacacgcaacgcccactcgcggcgcggctcgtcatccgatttgattgatcaccgatacagcggtcgcgatcgtgatcaatacactccggccgtccgagtgagcaactaccacgaggacgaccgtcgcagtctgtattctaacattggtgataattcggatagtcctagttcgcagcggaactatggactgccgtctagaccacggatgtcaccttcttttgcggctgatagcaggagagcttcaatcttgaagcctatgacgttagctatggtacctgatcccgataatctctatgagtaataggtctatgcggatttcgcttgcgtttggtgttcattgaccatcactacactgggtgttttagtcgttacagtttactggcctttcaatcttcgcgaaatgaaaccattcatcttctttttcgttatatttgcatttaaataacagtagctttggtggaaattattgaaaagtggatattacttcatttgtgatgtattcaaccttggattacggctcaatctcaatttcagcgctcttgtgacgtgcaactcaagtacttcttgatagcattccaattggcggattcttgctcccactttatcttgaaattcacattctaatcagggcagctgccagatatttgaacctctgtggcgatgtctttgaatatctcatcatgacgccatatcaacgtagttgccccggccaatagaaaatgccacgaaggagcgatccaaaacactttaattgtcgaatacattaaacaccaacaatagagaactcactatctcaataccatcttgatcaaaatggcagacgcagtagtccaacttcggtgtggtgtcaaggcaagtatattttgctaacatatctattctcgattctgatctaacccggtttaatagaacgatgactggggaaagaagggaaaagagtcgatggtagctcagctatggtcgaaaaccccccaaaatggaccaattgacgactccaagcactattcagaagtaagcttttcggaattattgaaccaagcacagtcatgttgaccttcgagcagatgtggatgggcacgtatccttcaaacccatcccacttactttccacgggcgaacaccttggggactatctgaagaagcaccctgagctagtgggcaagtccgtccacgaccgatggggtgccgagattccatttctgccaaaggcaagcgcaaaatacaagaattatagtgtgtggccatatagataactaacttggatctagattctatctttcagcaaagcgctacccttacaaatccatccagaccagaaactcgctacacaattgcacaaagaagatcctaagaagtatggcgatccaatgcacaagccggagattgcaatcgcactctcaaaattcgagctcttcgccggctggaaacccctgaaagacattcaatcgctgttcgagttgaaccacctggcaaagtacatgcccaaatccggacaattcaacgacgaggacctacgccaagtatgcaagactttactcagcgcaccagccaaagaaatcgcacagacaatgaaagatctacaagccatcccggaatcccagttcggcgcacacacctacatccccagcctccttggtcgtctggcaaagcaatacggcgaaggcgacaacggaaatctggtcgccgccctgctgatgaactacatgaccctaggaccgggagattccgtcttcgtcccgcaagacagcatccacgcctacctcgagggtgatattgtggagtgcatggcgcggtcggataacgtcatcaacacgggtttctgcccggccgcagaacgcgacagcgtcgagttgttcgggcaggctctcagctttgtaccgcatagttcagaggattcgctgttgccgcgtaaaaagagcgacaagggcttgaatggtaagacggatgtctatgcaccgcccatcagcgaattctcggtgctgtgtactactctcggcgctggggaaagcgagacgcacaaggctattctggggccgagtctaatgattgttacgaagggttgtggtcagatgaaattccccgagaataaaaccgctgagttaaaggagggatatgttttctttgtggggcagggtgttgcgctggactttgtgaccgacaagggcatggctgttttccgggcgtatgcggagtaaagaggctccggggattttcggcgatagagggagaggaggggtgtggcagcaggaaaaggtataaactgtgtgatatttaaaaaagtgaacacttgcattttgccaatcggggcttggaagattgaagtaaggcttgcgttgtctcagattgtatgcaggcgccgaagccctaactgtgagggtttccaaatccggtaggagactcatcaaatcaaaagggccagccactcacactaatcaacacctttcataatcccgagccaataagcgatgattcctttttctgaatacttgatctatgtactctgtacactagtatctaatattgaattgcacggaggttcatttgctgatcgcgaggcgctttggacgaaccagtcaacgtacaacagcattgtcggcatcggcctcaactggaacccggtgatggcacatgtatcgacctgatttgtgctgcagcaggttaaatttagaaattagggcgcatttacaaaggcctagcccgacggattaggccgattatgcaggataatggaactaatgccggctaattttgtcaaagttttgattctatctatagctaattgatactatctttattttccccgcgaatcgctcaaaatatctttgaaacagggaccgtgtgtcagggacagactaagcttcgttgatgcgtttcagggtattaaatatctatatcctcgcagtttcaaagtatggattgttctagcatcaattgaggctcaactccaaaggcttactggtctgaatacaatatcgtggtggtcaaagctgcttgacttcagttctttgcttactttggatatctataccctggatgttttcgtggcaaacacacccccgttgaagtatcctttgcatactgggctatgtcaatcaattcctctcttgacccccgctccgataacaaccactattctcgctcccccgtcattatcattggtgcaatagctggcagcctcatcttcctagcaagtatgcagcccgagccgcaaccctccgaaagcaaactaacctaaaccagtggctggaagcttactatatctcttctcacgaaaagaacgggccagaagaagaaacgtccaacaatccgaggatctctcccctctcgaaccgccaccagcctataaaacggacgaactaggcacacccagaggtctccactcccaaccccggcccttgtcttcctttgcaccggactacagtcgccaggcccagcatgtgcaagcgtaccaacagcagctctctcgcacttcatacgatcaacccccggcataccccacactgccaacatatgatccgtcacgataccagcctattcggccagcatccatggtgggcgatattaacgcccacacctatacctataaccccaccaatcatgccaatccacatcccggcccctcttcccgcttgagtgcagttcactacagtgacgccagactagcaacatcccggccagtttcaatggccgaccaagggcctccaattgggcccgtagctgttccaaccaggtcgaggcatcagccagctataccatctccaccggagcagaacgtcagacaggaacgcaaggataggagggaaaggagtgcatctgagccaatgatgttggcccaggccccaaaacaacctaaaccagttctgtcgcggctgatcaccaatttccgttgaggttatggattgtgatagtggcttgggcttggttttcttgtttttacgactatcacgacatgacgctttctgtttttgattatttggatttattcggccttggaaattgtgtttacaaatcaaatatattaaccggtgagaggctctaagtgttctccgtacagagtagaagacacctggtctgtgctataatctccgtccgatatcgatcaccccgagtttttccccttttcacatgcccttggcgcctacatctatcccaactggctccaacgcctcgatcatccctgagattctggtctctaattaattcttctctcagaacctgcgcaatctttgaggtactttgtgtactgtctactcgactatgcatattaatccttcaactccacttcgttgcagggattcaaatgcgtcacagtgaaacagtgctttttcgctttgagagagggggctaccccctcttttgatccctgtccttcacctggtgtttttatttctcattggcaatgactggtcaagaagaagccacttcaatatgtccatcacgccagttgttggaccaagacacctggattcaggatataaatctgccattccagatatctaaccccaactccgattatccatcgatggtctttgtccttgtgagtgcagatccctagacaagcgccatgccaagacgacgaacgacgagcgtgcgttgatacagacacactatatgcaacctatggccgacccgcgtcaaatccgtcaacgcatgttgactgcgccgcacctgtcaactgactatctattttgctgagaatggccgggggggaacagggatcgcaattacccctcccacatgcattgtctacgcacactgcagctataggagcctctctttacggccgcctgcttagatcctccagtcggccaagtgttcgccctgcaggttcgctcttttttcttattattatttttcgaagcgctgttgtttttgcgcattgcctctattctcagattctgctccgggggccaaccagaccaccgggttctctcccgggtctctaatcactcgttgggtcagttagctaccaacgccatccccgtcaagcacttcaccaagaagatcttcgctcttcttggtccgttggatatgcagtggttggctagtgcgcctccatggacgttttgttttgatataacttcaacgcacacgggcaatctatttgctctagtcaccttctctccatctctctttattcctcagccgtgctcgacttgtcgccctggggagagaacccatgctctctgtggggagtttgataagttctgaaatgaacaccgtactggggagtgatttgtcctcccttcggtaaattttaaccttgaacgcgtcacccttccagtccccatgaaagactggttgaaggccatggctactttcatgaagaagttcaaaaggaagcgcagagtgtccacagagctccactctcgctggggtgatgtttctatcacctatcccacgcaagggtcctggaatcagtggaatcaatcttctggtttcgtcgcgaatgcaatagcgagcaccaatatacagcccgaagcaaatcaacaatatccatccgccggcccattacgccagccgagttctagcgcctcgagcagacgatcgcgaagcacgggtatccgagaacaccaagtgggagacgctccatcctttccgactggatatttcgaccaaaacatacggcgtcgcgttggagatagagatacaaatacaccaccaggtccaggactcggccttggtgatctgaggcgtgggccaaatcgccgaccctcaagctctattgacaatgacgaatgcactacggatgagtcatgcgaagaagaggaagaaagggaagagcgagatactccgggcccacggattgaattaagccctcgggaatacggcacgggagacgtctcacacagaacacgcgacgatcccgaagatttcgataccccagccaggtctcctccgctctctgtgacttcgcgcatgcgccgttgcagcctccaaagctgtgccacagagcctacaacgtctgtatctggtggcaacaactcgagacgaacaagctttacagctgcatcctctatctctgctccctctatgccaccctgcacgcctcaggttgcgtacaacgccctaaagcaacctcccttcccggagaaaagataccctccccgtacaaaacatcgggaacccgagtctgcgcctccacaggaaatggtgccgtcctatgatgagctctatggttgatatgaccccaaccaactacgtgcaactagaagtctatatgtggtggtattttattttatttgtttgtcggtgtcccagaccaaattggtcttgttcgaaagttctgtagtcgcccgtcggactcgatttgccttgattttgttcaatagttttgcatcatggtggtttatttgcaatttcaattatctcatataattatctgagcacaatattaaggaaattcacatctgtacgtctatcgtttgtccttccctaagtacgttgtactgggatctattacttcaaaatccggagtcctgtcttcccccggccctagcaagaggggtgttgcttggcatatcaaaactccaataatttcccgtcgctttcacactcgagggatgccgatagccgtttccaataggcctcgactggaatttgcgactttccttagatgagggggtgaacatgcgcccgtccgtgcatcatgcagacggtatcacagtcacaattgcttctcaccaatcaagcgtcagagttcatcacactctgtgcacctgcagctatccactaagagcaggaggactggtcgatcactccatcccaccaactgctcctcgattttccagccaaggtgcagtcaccaaccagcctataggcggcgttctctaagcgctgaggaccaacaccgggagtaggaagatgtgcttgattcgacgggcccatccttcccgttgcctcgcccgagaattagctgctctgcatgtgcttgatggtgcagcacttccctgtcatcctggccgtcatatccacacggaacggatcaagagctgattgcagtgaaagaaagaagctttcccaccccgagtaaagtcccacagtcccgagttacaatttaccgtctctcatgccaacgtgagatctctctatccggcactctgcccactctctcccacttggcggtcgctgtaacagaaaccgtcggactctgtttcactccggctcatcatgatcgggttaagtggcgacagttcactttcctctaaaatgctggcttttgtcctggctataattttggtgaatagcccagctctagtggttttcgggttgaaaactacaccgggttcgccctgcactgatgtgtgtggtacaacgaccaacactacatcatccgagattgcgtgtttggatcaatcatacaaccagacatcagtagggaaaagtttcaaaaactgcatctcttgccagttggacagcgagttcaacgatgcggagaccggagaatcagacgtgaactggggactctgtatgttgtaccaccttccggagatcgcagactgcggttcatcgctcaggtctaaccgatcgaacagataacctgcgatatgctttctcgacgtgtgtgtttggatctccagactcgatctcgaatgtttcgtcaccgtgcccagtcgcatgcgatggcgtgcgtttggcagttgaaacagacgttaaatccccagacacatcgaatctggactcgtggtgtgaaagcccgtcgtttgcagataatgtagtcaacacctgcgagttctgctacaacttgacaaccacccaagtttacatggcaaactgtatgtatgccctgaaacccattcctatatcatatgatatcagcaaatcccaagcccaaaggttcaaaaaagcactactaagcatcatccaccaaacccagtcctcgagtccatccgctacaactgccatttcaagacagtaacgggcaagaccttcgacatagccccaacgagaatcttcagccaatcgctcctcccctcaagtctctctctcacaacgcccactgcaaaatcctcaaacctgaatctgggagtggtgatcgccgtgccaatcatagcattcttaattatcgtctcatccctcgcgatatgttgctttttcttcatccggcaccgacgcaagaaggcccgtcggaaccgcaactcacctcatctgtacaaccactggaacgatgggtcgccgatcagcgcgcagcagcaccagcaggcctgggctgagcaacagatgtataattccggcgggtatggccacggttcaggctttgcatttgttgataatgatggccgcggacaggagcttgcctatggccctggccaggaccaacattatcaaagccagcagtatcagcagcacttccaaggtcaggacaagtcaaccttcacgcaggatattatcgaagagcctgcaccacaggaataccagcagcagcgtgctcaggttcctgctcgctctcaggtctttgacccggatcagaagggccagcatgttcaggatcctgttcatccgcaggtcttggacccggatcgaaaggaccctcagcagtggcagtgattgttgtggcacctagtacctagttgtgctgtatagcatcgttgtaatgtctgtggatggcacagtcagttgaaggcttggaattaatgagatcaggatatcagctcccctattgttgatagcgtttgggtttcttgttttacggagttgttctgctttaggatcgcgtcgatatatccctgacatcttgcaatgtcatatctttggcgtatatagtttggtcaatagccaatgaagaaaaaagtgcccagcaaggctttcccgtcaagtacaataatgtactcaaagtaaaaaaggaagggagactgcaaaggagcagcatccaatgtcaccaggaagggcggcaaaccgacttatgtattgactgccagcccctctaccacctacatgtacacacataacaatccgaaaatagcatcaacaagccacagcaaagcaatgccaacgggacaagcggagcctacacaagccagactgtcagaaaatacgagaagaccggccatataacctttgagcgacagccttttgtgttccagcgccgctgcagattggccggccgttctgcaggcgtttcagcacgcaccgccaagggtccaggggtccaatggggatgggatggtcgaccctgatgttatttttggatctgtgagctgtgtggtgattttggggattgattattgggcgttggaggtattggatggcttgttgcttggtccttggtccttggggagatgggttttcaacttaggcgctgccacttgtccacctatgttgtaggtacattttttgatatagaatgaataaattgaaggattgcaattctacgagaacgtagtcatcgaagaaaagccgaagaaaactggggtaagacaagttgcgcccgttgatctacacttttatcttatcccaactctttaaccacccaaagctctcaactggccatgtccaacctcacccaagaacaaattaaagtcctcgagcaatcgcggcagcgtctcgtgcagctcactcgctcactcggctcgctgatcgcaagtctaaatcaaagcgaccctcttccgccgtggtaagagcgctaccatcccaccaaccccatccccagacctcagccaaatacaacgactatccagaaacaaactaaccccaaactaggacctccctccaatcccaagcaagcatcatctccaacaacctcattagcgtctccgaccaactctccgaccaacgcgacctccttaccaacctagtcgcctacccaggcccagagtacccgggccgaacacaagcaaacacgctcgagcaactcctccgcacaaaactcgatccccgcgtcgaagactgggttgcgcgcggccgtgcagccggtacagagtccaccgcagggccgtctaatttcagctccgattccgatgccgcgcataaaccgctgagcgatgcgcagctcgcggagctgtgggaatgggcgccgctggaggcgaaccaggaagcgcggcggaggaactggggtgggaattttacacttgaggagcgcgaggctgggattgagaatgttgttactgggttgaggaggcaattgcaggacgatgatggggaggaggagagtgaggatgaggacggggatggggatggggaggagatggatgttgttggcgttcatcggaagcctggtgctgctgagttcgagttcaatattgctactcaccatccgcatcctgttcagccgttcgtgccgctggatcttattttgagatatatgactactggacggatgccatagtctccgatctccaggcacttgactcagggcaagtagtctgtgtttacggctgtacttggtctacgatttcccatgaatagaacttctcgtagcatgttcttctaaatgcatgattccaaaaacggacggcaatattattcttttgaaaaaagcaaaggtaagcaacagccaagctatctaaccccgtcggcgagtagtgggtgtcttgacggtaggtctcggggacgctcccgtgctctgggccgatgatgccttctcagctacctttgcgcgaggagcggccttctgcttgggcgtcggtgcattccagtaccagagcatctggattgcgaggatcacattgagagagaagccaccaatgaatccgtagaggataaacttgtcgtcgacttcctggagggtcgtgaagattcgggacatggatccgatgaggtagttgaacacctgattaaagaaataattagtgtttggactgggatcaggttgaaaggaaagagaatcgtactgtgaatgcactgagctgtccggttcctccctcgcgccagatggtgtagatttgaggcgccttgctagcaacacctagagcacccgcaccagcctgcaggtatgacatagtatgcgcatccaccagggtctggtcgaacaacagcgcataaatgctggcagctacgacagcaatgaaagccgcggcagcggcagagcgtccggcatagttcaagaccagaataccgatagcaatatcctggacggcgatgagagcagtctcgccataggtgctgaatgggaactggttgcgcacgccgtacgagagagtgatgagcaagctggcagtttcgagggcgtaagatacgaatgagacaccggccgatgagcgggagctgatcagcttcagaatctgtgggattttgacgactgcactggcaccgacgatggcaatgccgagggccttggagatggcgagtgatgtgcaggcagggtctttagtgagatcgagatcgaccaatagtgcaccgtggcaagactttccaatcaaggacacgacggcatcatgcactggttcagggatggctgagacaataggcgccaaataaggctgaagaggcgtaatcagggagttctgaaggatatccattttgacgagaataaacaccagaaaggaagaacaacagtattggaggtcaggcaatgtccagaagaacaatttgttgacattccgaagtcaacggatgtggcccgtgcacaaccggggaaattcaacttctttcgttctcttttcttccttctgcatgaccgacccgccatgatccccctgcggccatcccttctacgaaggcctcgagaggcgctattgtgctcgcaatgcctctttgggcctcgttctgtgcgccccgaggccaatcgggggttcctatcgtcctcgaaacggcggaccgggactgcggatgatcagtccccctcggtattccacaaatcatacttctcggccaatcgattctacgacgggtcaaatatcaaaggcggcctgctttcttcacttgcatcctccaatgcgaaaagcaaatcaaccacttcttcggctcccagcggtccgactgtcagtcaggtcaattcgtctgcaacagcatcgtccgctgcgattgcgacagaagcaacaccagaggaactaccacatcggcggcgaaagcgcttgaaggatgaaagcaacgcaaccggaaaaccagaacccagccttccgctggatgcctcggcgcaattgtcgaacttctcatccacactccccattacctccatccgccgcaagttggctgcgtatctcgccctgacgaaaccgcgactgtccttcttgatcgtcctcaccaccacctctgcatacgggatgtacccaatctcgtccctgcttaccctcgacccggctatgaccccactccccacactttcgacctcgaccctgacttttatatacctgacggtgggcactttcctgtcctgctgtagcgccaatacactcaatatgatgttcgaaccgaaatacgacgcactcatgtcccgaacgcgcaatcgtcctatcgttcgcggccttgtctcgcaccggggagctctgctcttcgccattggcaccgccgtcacgggcctttcactcctttatattgggactaacccgacaaccaccgccctatccgccaccaatattttcctatatgcctttgtatacacaccattgaagcgaatccacgtaatcaatacctgggttggcgcagtagttggtggtatcccgccgctcatgggatgggtcgctgcagcaggtcagacggcgacgattggccatgacacatggcgtgacatgcttttcagcgaacagagtatcgggggatggctgctaggtgcaatcttgttcgcctggcaattcccccacttcaacgccttgtcccatctgatccgcgatgagtataaagcagccggctacaggatgctatgctgggtgaaccccgcacgcaatgcacgagttgctctgcgctattctattctgatgttccccatctccattggtctttggtgggtcaatgtcgttgggagtggtttccttgtcggcagcactttcgccaatggctggctagtccgcgaggcatatcgcttttatcaacatcagggtgcgaacggtactgcacgtggcctcttctgggccagtatctggcaactgcctattctcttagtcggcggcctagttaccaagaagggtctgtgggatggcgtttggaggaatctattcgggcaatccgaagaggacgatgatgaatatctgtactatgaggatgaataagagtttgaaggcgagaaggctaagcaccatcccctgagctatcaaccgggagtactttgtccactgaatgagctttgaaccataagtctctcgtgctggatatcttccagcttcattcatctcacagagctaactccccttatctattcgaaccacatttttgttctgggattttgtcttatacggcggtttggagtggcgtttctttttcttgactttgtataacacccgtcctatatggaattcatacagatattttcattcttgtccttttcattctttttctgcactttgatcaaataccataatatacaagctacttcccttggacacgaacttccccgtctacacatccctatgtctgcagaaccctcatgtcagcagtaaggctttggacagcatggtggacgacaattgcagtctgcgaccattctccaaacaaggtcttaatattagggtattgtctgggagcctgtttgacgagcttggccatggtggggcggccagctgcatccatcgcttgacaggcaggtttgtcatcgatacagctagcaaaaccaatgtgtgacacgcttgagttaaattatatcgaccaaactttgagagtttcagcaccaaagcgggaaccttagccattcggccataaatagtatgagatatctaaaaaaggctacacggcgaatacgcatatcaggaggttggtgaactctttgtataatccggttgatgccgagaggagagctatgtattcaatgtcctagaatgccaatgaaacctcgggtatagtatagtacatcagtatagtacaaaatggattgtccacgaggacattgtgatatacaatggccagtaacgacggccaacatctacttcctcaacttcaagtgatacgtcttcagtgcttcctcggtcatgggactcggcgctccaaccatggcatcgtcgccccccttgccagtcttcgggaaagcgatcacatcacggacggattccttgccgagcataacagcaacaagtctgtcaaagcccagcgcaagaccggcatgtggcggacagccagatcggagggcatcgagcagatgtgagaagtctgtcaaccgctcagctggcatttttaggatgtcacggaagatgaattcttgcactgctgcgtcgtgaatacgccgactaccaccgcctagctcgacaccgttcacgacgaggtcgtagtggtcagccactgcctgggtcgggtctgtgaggaggaggtcaacgtcggcgggggtcttgggtgcggtaaaggggtggtgtgtggacgagaagcctgctgcgccgccctgaccgggctctgagtctgaagagggagagaagagggggaagtcgacgacccagaggaagtcgaatccggtcggggccggcttgaagcctactgagaccgaggcagcgtgcagtgcacggcgtagatcgccgatgggggttgagcccccggagaaaggcgcacgggggcgtgcctgcagaacgatcaggtcaccgtgatcagggtccaacaattcctcgacttgctcggcggcttcaaatccgaagggctgtagtccacagagcggctgcttgccattgtagacgaagacgcctgggccgccgtctgggttattgttgaacggcgcacctgcaggggagtcgaggaactgggtaatgaacttgtgagtttcagcgggattgttgtcatttccttccaccttgaaagcctccacgatgggattggccaggtcagaaatcttgccgactagatctacggggagaacatgatcaagtcgaatgatttccatcccgtatctcgtgtccggcttatcagagccatatttcgccatgacttcctggtaggggactttgcggaatgggccctccggtgcagggtctttcatcaacgacgaccaaagtcggcgaataaccccttccacggtgcgcatgacatcgtcacctgtcgcgaaagacatctccatatcaagctgtagatattcaatcagcatacatcaccatcaaccaaccaaccatgtagtaatccatacctgagtaaactcgggctgacgatcggcacgcaaatcctcatcccggaagcagcgcgcaaactgataatacctcggcaagccactagccatgagaatctgcttatactgctgcgggctctgaggcaaagcataagccagcccttccctccgtgtaggcacaatgaactcccgagcgccttccggcgtagacttgaacaacagcggggtttcaatctccacaaacggcgggcactgctcctccagctcctttttgcaaatattatgcgcgcgggcgcggaagcgcagtgcttcacgcagctctgcatctgagcgcagctggaggtatcgttgctcaggtgggaaaaccgtttcaggcgtcataattaagtctttaggaaagtcgttgaggggatggatttcttccaatgcgagctcccataggtcttgcactggtgggttctctgtctctgacggcttggtctttttcttttgaactatcccgcgcacagccacggggctattcacgttcacggtcttgagcttctcgaacgcatcgttcttggcgaatgctacaacttgtaggctatgttgcagggtgggatcggataagcgcacgaaggatagtttcttggacagatctgctcggtttccgaggtatccatgtagtactacttctgtgtttggctcggcctgtgcgaagaacgtttcgaagtcgtgggtagcaggagggaagtccactgagaggcatcatgtgttagccacggtcctcccagactatggagaaaccaagcttttcagcacaagacaaccacataccagaccgcttgtaagcctctagaaattcaggaagccgtttagaaggctcttcctgtcgcaaataagcccgagcatggaactgccggggcgcctgaacagggctataacattgtctaggcgaaatggctgatcgaccccgcaggagattcgagatctcgatgtagctggatctcaaccgcaaattgcggagctgcacggcagcaattggcatatttcaattatattgaatgcaattgcagccaaatcggaagaaagcaagacatgcatgtccggacaacctgatcattaaagccggcagaaagccactccgccctagaagcggactagcgcccgcaggaataaaaagcgcgggattttcacttgttcgtttttcttttcttcttcatccttccaagttttatacttgtgagtattgctgttcccagccctttcaatgggcattattgatcgttatactgactgtttgacagaatgatgaaagcctagtgtgttatatatgagacagtctctgccctctgagacgtgcggctctctctcttcggggagcttaagggctgtacgaatcgagggtagggtatgtgatatatgcgttcggcataccaaccttgtttacacaacggacgcgatgaaggcatctctgatccatttacaagacttgaaggtgtaaccatgggctttaggccatggtttgagggttcctcttgaagcagggagagatggatgttggacaatgttggtgacagctcgttcatatccgatgtcctctctctcggctcttagattcgcatctagctagctatacctcatcctcccctatgtatgggctcttctcaacagtaggattataccagggtcaattgtatcagaggcacaagtgcctccgtcatggttgaactctccttaaatccacttataagaagagattggatgtttgaacaaatatcacggacttcaatattcagtacttcccgcatgtaactatgtcttgtgtttgacatagtacgactaacatagccatcgttataacgatctagctcttcgtcaaggttaaattttgaatcgcaacgacatattttgatatgctgctttctcccagcaagtaatctatagaaaacaaaccactcctaaatacagtcccctcatcgaatatttcagaacaccctttcacgcaaagatcattttctctaacacctccttctccccactattctcaacgagattcttaaacacgccaccctcaatccccataagatctctgggcgtgccaaactcggccgctttcccagcatccataacaagaatgcgatcaaagtctgcaatggtgctaagccggtgtgcaataaccagcagcgtggtggcattgcggccgaattccgcacggatagacgtctgtatcaacgcatcggtctccatatcaacagccgaggtggcctcatctagaaccataatcttaggccgcgagacgatggcacgggcgagacagagcagctggcgctgaccctgggagaggttgagaccaccctcagagattgttgcagagagagaggtgaaagcgttagagttggttttctggaccgtcgctggtgtcgtggtgcccgtttcgctggcctggcggggtgtggcagtccgcgatgtgagggtgagctcgtcgtcgtcggcctcagatatgaggtgcacgcgtgctagcgcatcgtagagttccgtatcgctgtattcatcgaacggatctagatttgatcgcaccgtgccggagaatagcactgggtcttgtgggatgattgcaagtcggctacggagatcgtgcagtttgatcttggagacatcaagtccgtcgatgaaaatctgacccgagcgtgcctctaggaatcggaagagtgcaagcgtcaacgaggacttgccagctcctgtacgtccaacgacacctacccgctggttcttctccactgagaagctgagcccgtttaataccgggggaagatccggtgcgtagcccaccacaagatcctggacctcaagatggccctctgtgggccaagccgcaggtgcatcggctcctccttggttctcgatctcgatgttggaatactcgataacacgctctatggcgttcatattcaattcaatgttagcgtattgcctcaatgccatcgtgattgcagcgttatactgcagggcaaagctgagagcaaaacccgcaagtgaagcgctcacacccggcagatagaccacgagcccagcagtgacagttgagaagatagcaccgatgatgctcatgcggaatgcgagccagcggttgaacagccacaagttccaccatgcttgcgcatggcgattgatcttgttgaacatgatttcgatgtaggtgtctggcttgctgaaggcacgaatggtgatcaggccagcgagactagacccaaactgctcaaacacggggcttttcgcagtgctctcaagacgtttgacttgacgggcaccttccaaataggatacggccaatttcagacagatgagcaacaggactatgccgagcaagatcaccatccagtcgacaagcatccccgcaatcatgattgcgaaaacatctagtagcttacccacgaagaacccgatgtcgtatccgattcgtgaatcgattgagtgaaagtcggctgtgaagcggttgagaattcgccccaatgggacagtgtctagccaccggagtggcgcgcggaggatagcataaatcaagccattgaaaaggttcctcgaggcccgcaccgaagccgaaagaatgcagtaataacggactgtccctattatacaggcagtgatcgagatagcagcatatactccgaggtacatatagaggtcgtcatgttgtgggaccggtgcagtttctcgcatagtatgctgcaataggacactgtattgctcagggtgtgctttagtattggaggatgaacttgtccaaacattgatccaccaagactgtgataaataagaatcagataaaggacaacgacaaggggactgtcataggacttcatgcacttacccgtccaaccatgagggacgaaaacattaagtagaccgagagcgtcaccaaccaatagaccacagagccacctttattcaagaaagaaatgtaaactgctagccgcacagaaccggtttctcgtttttcatcttcaacaaatttcttcggtttcgtctgtgtagtagcaattccatttccgttggaagctgaaccatttgtggctatgttcggtttttgatgggatgtattagagatcaccttttggagagttgtctcctcatcgttaaagaattcacggtcttctccatctgcgacaagatccgcttgttctgcggcatgttccttaccaaggatatcctctaaatgatgtgattccttcaggtcatcaatggtacctgcatatttgatacgaccattctccaacagtacggagtagtccgtgcgaggaaggcatagtgcaacatggtgagtaaccaaaatgcgagttcgattttgaccgagtttgccggtgagagcttgctcaaagacatgacgacctgtgtgggcatcgagagcgctgaagatgtcatccatgataagtatgccagccctagagtataatgcgcgggcgaaggaaatacgccagcgttgaccaccacttagattaacaccattcgcaccaatatcagtcatatcgccgtctggcaacatctcaaaatctttttccagagcacaagcaaagatgacctcttggtatcgctctgcatcgtctgggagtccaaagagaacgtttgctttgattgtagcattctcgatccatggcgtctgagcaacataggcaatggccgagtcgataatccaatttgcctttgtcgcaaggtggtcaaatcggtctttaatgggaggtggaacgggtacctttatcgttcctgcgaggacatcacattcacccatgatcgacgagaggagcaggctctttccagagccagttctgcccgataccacgcttagactcttcgttgggaatttcaaggtcatgtcacgcagaacgaaacgatcctctaaatcttggatatcttctgcctccgcaggccatgcagcagagacgtcctcgaaagcgatataatcagcagggacagtattgacgacattttcgggcgtagccagaaatttgtcgatacgttccgagctgaccttcgcctccagacccatcgacatcagctccgggataacagcgagggccacctcgagagaattgaagactgccatagccgtgaaagccacagaaggtgacaaagtaccattgataatggcgtatgtagtcaacgaaacagcggataatccgacgggaccgagaacccagatcgcaagcaggccaatatcagcaagaaaagaagcccacaatgcaccaagttcggtttctcgcgtatcccggacacgctcctgccattgttcctccagagctgagaatttgatttggcggattccctgcagcacttcggtaacgatcgccagcttctggtcacgggatttcatcaatcggtcctgggcattcgaatattttctagctgcgtatacattcaatggtgtgacaagaagagagaccgaaagaccggcaaaggcactgcgccagccgaggatttggaccagaaaggcggcaccgatcatgattctgaagatcgcctgtgggataatgtagttgagagaggcaaagtcggaaactcgccgagaatccacggccacatggttgataatactctggcggctcttctttaacacatgatcgtcatcgtcgtcgacttcggctgatcctttgctggaattatcggaattatctggcttggacttctttgtatgcttcacatccttccgtcgcatggctttggcaaatataactgctgacagctctgcgtagatcggaaccccaagtctagaatagaccacccagataagccacgcctccacgctcgaggcaacgaacaacaacccacccagggccaggacccagatatacgatgctccgacattccaatccggggtatcgcgcagttcgagtgtcttcaagatttgaaaaagggcgacctgtggtccaaagctcagaaagcaaatcgtcagactaagcgtagtttggacgagcagtgatctccaatgcgcagcgacaatcgctacccacaatttccggttctgtctggcagtttcgaatttctcacagagaaaagcagcacggttcgatgctgtaagcctggggatatcgtccaaatccatagtcttgtgcttcactgcgtagtttagcaagccattggcccagctgaaagtgaagcggctgagtagcgagaccgaaagctcccgctcaaccagcttatcttcatagtaaatatcaggacgacgcggtagtagaacacatggtacggcgcgaagagcagcgcaagcaatttgagccaattgcaacccgacccaaagtcgcccatgcggaaggccaagtcgggagaatatcaagatgcccagttcaatgcccggaaccgcaatggtaatgatactgccccagaaagcaaagtggccgagaacatatcggcttgtcggtcggggctcggcgaagaaagcaacagcttgaatagcgagcagaatctagaaagaataagaattagctattaagcttggcttaaatcgaacggttgtcggggtttctacatacccacactccaaactgcagccataccaatggcgtggaattggtaatggcgagcttcaatgtcgcaagcacagccgatgcgagggtgaccagaaatccggcgatggagaacagggcaatggcaatccgttgccatttatcagagaattctcggagggattcctcggtcgcttcgccatcttcatcgcggtagacgtctttggctagttggatgggctcataatcgcgcgatttgcgtgcaatgcggtgggcaatactccgaatggctggtatgctatccagagcaactagcgacaatgctagataggtagatgtcgccaagtaggccatatttttcagagacaaaaaacgaaagacaagagagaaaggcagacaaaagaaatatcatggcgttatcagcccccgactatagcgaatacgcttgcgcatgctagcgcaagctatagtgacatcgagcgggggaaatagaccgatctcagaccgccagtgactcaaaggcctcgcattcataataaatattaactgacagatttcgctctcgggctgtgtattgagtcacacgcatgcactatatcctgcagatctcgtgttcaagagtcactgtttggctgcacatcccctgtagaactcccgggctccgagattggaggtattgcgcggcatgtgccgaatagtatatcctgtactctctacggagtaagcactaagcagttagagcaattgctcactttcgcctcttccaatcccagcgaaatccatacgtccccacttgtatagcttgtacccattctccgtctaatgcaggaccggcctccacccgcgtctcggcacaaactcatccacggcctcgtcatccaagacgtcgcgccccaatcgcgccgtaataatactccgctcagcctccggtccgtgcacgtaaaacggctcgaagccttgtccgacgggtttagggatccacgttcttttcctgcctctttccttcgacccctcacttggatttcttatgatcggctcaaatccagaagcttcccggtctaaactgaggtaccaccgccgttggtggatcgagccgatcgtgttgttggaccctgggtaggcgttgtttctttggatttcaatgtcggcggtgtgggtatcgtctggacgtgcatgcctagccgggccggtctgagactcgggttgagatcgttgcggtgttggatccccacttgattcttgctgaccaggtggcggcgaaggcgatccagagtccgaggtcgacggcgcttgtggtaccgttggcctggatgggtgtcgacgacgccgtttggggccttcgcggatcggcctcgcgaaatcggttgttttatccatccgcagaataatagtgtagtcctttggtaaacgggttccatgaagtcggagtcggattttgcgcttggtgtttcagtgttagaggagtctattcagtgtctccatggtacagggatatacctacattctgaaaagcttctcgcaacttggcactatctgagatctgctcttccggtgcaacgtgactatcttcggagttctctgatcgagaatcatcggtctccgggccagattggtccatttgataaggtagaatttcatattctccagtatcccagataataagactccccgttttgtaggaagccgtttcaatgagatgattctgtgaagatgtaagtattgctattataccatctcagatcatcaacccacccatagacaatggattcgagtttcagttgcattccggtttaatcgctggctattcggatccccaggcatcccatacataaccgaccaactcacagagctagtctctgagaactggaggcgaagatcgtaatgcggccctgcgatgggatggtcatgttgatgaatgacgaaatgacgtccttctgggtgctcgtttcgtctatacagctcgatccattctttgatgggcagccgtggtaatgactgttttggaggtgggcgaacgtattctttgagctttgcggaaatcgtgctcagatggtcgatcacttcaacctggcctgcttcgatggcagcgaggctgggtgaagtgtttagttgtgatacgttcggcgggatggagtctcttccatctccatccttgacacatttgatggatgatctcttttttggcggagagacaggcgtattaaggctcatgagaattggacgctcgtcatttagcggaatttcttgtctcagctcatggtctgggctagtttctgggctgcaagcgcgtttcatgattagagcaccggagccgagggacgtcgtagccggtatcaagcgagagttagagccgtgacatgcatcgaagcagtggtattgtttgattcgactacaacctgcatgactttttatagatggaaacttgagttgatctcctgcggccacaaatggcttagtaacaagcttgacttccaaatttggaagctttcggtcaacgacgtcagaggtatgagactcgatgtatacgaagctacatattaatatcgtgagattacaggtggtgagagcgaattccgagacagaaaagttctagccaattgaataagtcaccaatcaattatatatctacgactgataccttttttatcttcagaatcatatctaacttttcataaagaatgttcaaattcatttcaatttaagactacatgcccgcgaaatacaaaaaaagcaatactggcaaggctagagttattgcagtgcctgtcaataaaacatatgaaactggagcccaatttctccccaagcagccctaattgtgagaattgagaatgggattaacagccacgctctgtgggttatggaagacatccttcggatcaatgagagtcttgatactctgaagccgtccaagattggatccccagtaggccatctggccattctcgaggtagggatcgacatatcccggataggaacgcagaggaccgggtggtcgattttgtatcaccacttgatgcaagcgatcgaggaacctcctggcaatgaatgcaggaggctcaaagccgacaacagcataggattgcatccacatgacagcatcacggtgaacataggccgtggcattcatgggaacatcgttggttgcgccaccttctaggtcgaaaataacccaccagttttgactgcccttcggtgcggtgtcgagatatgtaaacaaggcgactagggcgtgctcggtgaatagttcgtcaactgtgaacgatactgacttggagtagaacgacgtaagtaacgctccgccgatcgagacaagataattctcagccgcgtgggctaccaaggctagccaattcgtaatatatgccacattgccattgttttggattggaagattgttttccagctcaaattcatggaactcttctctagttccgaagaagctgcccgtgatcacaatcccgccctggaagattgtgagctcggtggaataattccgcgtaatattaggctttgccacgacggattgccaagctttgaagagtttgactttgtcaagaacatccccttggctgaatgtatacgtgtattgcacagcgcccttaggaatttcctgagtgcgaactttgaactcagtgacgatgccaaagctggctgccgcacccttgatagcccagaagatgtcctggttctgcgtttccgatactgtcacaatgctggaattggccaggactacttcagcctccagaacatgatccagcgcagttccccattgtcgcgacatgagaccgaggccaccaatggtgaaatgaccaccaacgccgacctgtggacaagatccgtgtgacattgctctaccacctgcatgcaaaaggcggtcttggagatcacccaaatttgtgcctgccccaatcgtggcgatatgagtgtccgggtccattgagaatttctggaagtctttcaggtcgacgacgacatgaccatcggctcctccaagacctaccatagtacggttggtttagcaagggtaggtttggatcaagaatatacttccataccgtaattgccatagctgtgacctccactgtaagcttgcacctgatagtttcctttgacagcacagcgcacaatttcagcgacctgggtcgtattcttcggataggtgatcacctcagggtgaacaggaatggccaagttataggatggcagggcccggaattcatatagaagatctccccgaaaggttgccatattggggtttcctcccacagcggccatgaagcactcacggccgacgacgctggatgtgttccccattctgaacgagaacggaaattgagggttgttccaatatggtcaagttgaatgatgtatctggaagaaaaaaacaacatatggaaggagctccataatgaccaatggaacatatagaaggggctggattgcgactgctttacgagaggtctgctgctcactccgacgtctcattttcggtgccacagttgttacatatgtcacgattgtcacattcattgataatactcaggaggtctcctgattctttgaagacattcgtctagagattgttactccagtcgtcttgtcatgctactgtgtgtaggggctggtgtcacacggcgaattagtatacgaaagcgcttgaggtgatgatatcgagggtaaatgttcgaataggatggtcaaccaatgagctcataatggcctacgtgaataccgagagatgccgaaagaaaatgctcggggaccactataactataacggcgacgtgggtggtccccgatccggaaatcccttttgacatggaagaatatggaaagcttatcttgactcctttgttcctttgctttttttttaaaaaacactgaatttgagaagatccccggttacagatctttccccccctgcattccttgggcgttcctatactgcagctatcataaaaattcccgtcaaaccccagattacacttcccgcaatgacatcaggaaaaaaatctggataacaaagacgaatccgcagagcatcaacatcatgttcaccccaattcataccacgctgggcgcactgttactattccacggctcgtcaggcctgctcatacacaacggcgccgtcttcggcatctcctctctcttatccgggtgcgccttcagcccgagtcgtgacaatgtgcccatcatcgcgggtttggtatccagtattgtgccggtgtacttgctggcaccatcactgatcccgaactatcccgcgtcgccacactcctgggcttctgctgcagcaacgttgggagtgggcttcctattggggtggggaacaaaggtgaggagtatcggacataattgcaaaaccaggaacaagttgactaagtgaagcagaacggtcaaggctgtacctccggacacatgctgtgtggcctttcgcgtctctcgccccgctcattgattgcaaccgccatatttttcacaactgcattgctcacggcgaacattgtcaagggcagatccaacatcccgtcctgtggtacgaccccgtgctatgctccagtgtatccatctgagtcggagttaggcttcatggctggtgcagtgctgctggcgggtataacaaactttatcgttgtcccccggaaagcccgccggtcggaggaatctagggtcatctattcctatgtgacagggttggaatttggtctgggtcttttcatatctggaatggcggacccagcaaaggtgctcaggttctttgccttcttgactgacccatcccgatttgatccgtcgctagcgctggtcattctatttggaattggaccatccctgattattttcctgattcagaaaccaggccaagcggtcgaaaagggaaagcctgttgcaaagcctacccttgctgagaaatggcgactcccgacggccacggtgagtgacatagattggcggtttgttataggtgctgcgacgtttggactagcctggggactggaaggtgtatgcccaggccccgcaatcttgcggacaatcctgcaaccaacttggggtttgatcaccatgggtggatacatgctgggcaacctcatttaaagggaatgggatatagagattatagaaaattaattatccattagctttgtcgaactttggcgtgttctcgggggaataaagtcgtaatcggtgcataacggtgcaagaaaagaaagtatggaagtccggagatctcaggagctgcatcagaggtttgattagcaaaggaaataataccataagatatgtacaaattcggttcaagtgagaatagatgccattgatctgtgaataaatgcattgggtatataacagagggaaaagactagacagggaaccgaaaacacagaggggtgagtaaacggaagaatggcttacaactcagtctttctgtccatgcgaagcgcttccaacttggccgattcgtcgtcactgcgcggactaggggccgatggatggccaaagtacccttccaactccatccactcagcaacgaagccagtaactagcatgctccagtcctcgacggtatccaaatctaaatgctcaccgtcatcgtcgattgtatgccaaacaggagggaatcccttgaagggggcatagtcgataagatggaggatctcaactccctttgcgaggaaaggaatgtgatcatcctggatgccacccataggtgagagcgtgtgcccatccttctcggtatcgacgaaccacggatcagccgagacagacttgaactgcttcaatgtcttgaaccgcttttcaaggtcgcccaagctttgataggcccagtgagtggtctcataccaagattgaattgtcggggatttcgagcccagcagatccaaaaggacaaaaagagatatagatgacagaggacccttgaattccgacatcgcgggatagacttggtcatcccaatgtgtagccaaggcacgagctccgtagagagaatcggtagaagtccattcttgaaaggcttcttcgccatctaagaatataacctgaaggccccgctcctcttcgaggtagttatatagtccctgctccttcaacgcggaccatttcttctccagcgcggcttcaatgctgcgcatggcatgcataatcatcgcacatggcgcagcactgtcgatccccccgatgaagcctttcggttctattttgctgtcataatgggcgacaagagtgagccggccaacgtcaccaaccgaggcccaaggaggatcgcgagtagcgatgaagtttcggaagggcacctccttcccctttgatagtggcgttttagctgtagagttctggatctcaatagtccatttgggcaatgtggttcgaaaaaagtcggcgaagtgattgagcaccgcggtggagccgggggtgccagggacgcgggtccttagtataggtgagagcagagcgccattgtgaatatcgaagtcgttgttggggcgtaggagctcggtcagcgtcttatccgatattttctcgtatgcttccacacacgctagaagcatgacaaaaagccctagccaaagtgacacattgccaggcgggatgcgataagccggagacatggcgttgaaggaaagctcgcgctaactgctcatgacctgcatcaaagcaatgatcggataaatctcaagcctagtccagccagataatcaacaatatcataaggtatgagatcaaaggagaatgtgtcaaagacctggcaggggtcagctcatctagcaatccagacggagcggaagctaaggcggtcacctttttgccggccccaatttattgggagatcgatcaatgtcaatgtctaaattccaagccaactacaacacatagacacaatgcgacttcaaattttacttcaccctcaattacgcacaactctaccagagtgtgcccagcgcagtcttcggaggaacgtctgggttcggttcaagtcacagatccctcggccatcgcagaagcatctttcgccattacccaagtcgaaggaaaccgtcccagctacgcgttctccagtaacaaggacgctcacaccgccaaagacaaccaccaggacaggtaccgtgaaccctcccggccagttgttagacgtgcgtgtgctgagctatagttacaggaccacctgaacgtatcttagtgtactacggaggaacgggtagagctatctttctggggacgctacgaatcaccacggtactcctatttggtgcagcgtgtctactcgttgcaccagcatgctccgtggctgacgattacccctggtatagcacacctgcgggtaagctaattgaacatccacatcgcctgagcgtctatgctgattttacctcagtgattgccgctggtgccctcccgatgatatttgtctcctatactgcggcgccatatgtaaatttcatccatctggcgttgccggcctttgcgaggaagtcccgtgaagctgccgtccagtatgcaaaagacctgcctccgacggccgtgctgtatctcaccagcatgcgattcaacaccattcctcggcaaacagctgttcgaataggagacctcgttccatttaaagagaccttgcggcccgtcacattccagaatctgaatccgtcgccgcaacgatggtggcagggcagagctccgacccagttctatactggaactcacagcaaacccgggagacaaacatcggctttctacccagaattgtggaatggaatctacgagcaaattcagaaagccaagtcgcagcctcgttgatcgaatatatacccgccacttgatggctgccgatattaatggtcagatgcccatttctctcagttggttgatcgacggagctaagtttcagtcactctaatcgaagacgtttggttggatatcaattgacaattagacacgccagacttatttcacgacatccatttaccctaaggttttggatctttgtcatatagaaactatccatatgaagtctcagtcacgcgttaacgaaagaagtcatttgcccttctttaggggaaaattcgtccgttcatatagtgtcgatatgcctcaaccctcatctagctctcatcttaagcaactctgaaccaaaggttctcaaagcaaacatattgcctcttccagtagctcgtgattgaacgtccggacgttaaatatccgtcatttccaactcggctgatgttctctttcttcatccacctccgcgttaacggtttcacttaacgttttcaagcacgattcacatctatcaaatcttggttttccctattcacgtcgacgcggtttctccttctcttcctcaccacctccactcgcccatacaacttccttcttccgttgtacacccgttacttcaagttcaaatccgtctcgacgctcgaccttgactaccaaacttacatacaatctaacccggctaattcaagatgtcttccccggctgccccgaaggagaagctcttcaccggtatttccgccactgagaccaagctcctggtcttggccaatgtctgcctgaagaatgacaaggtatgccattaatcctaggttcgctcattggaatgtgcttgctaatacagtggaccacaaagatcgactacgagaagcttgctttgaacgctggcatcaaggcgtcttctgctcagacgctctttcgcaatgccaagcgcaagctagacaagatgtacggcaatagcaatgctgatgccaatgccaacggtgccacggccgacctgtcgcccgaggagactccctccaagcgaggaaagtccaccgcgaaggcgcctcgtactccaaaggttcttttgtcccccaaggcgaccaagacttcaaagactgtgaagtcccccaaggcgaccaaggcgaccaagacctccaagggtgacaaggccgctaccaagaccgaggagagtgcagaccaggtttccgccaagcccgagcttagtcctaccactgcaaagtccgctgctgatgtcgctggaggtactttccacggggccaccgtcactgagcctgccactgagccatccgcatctgccgccaccactgagcagaccgagcaagatgaggaggcaagcgacaagatcgacaacaacgacaaggccgcgcgtgatctggtagtgaaccagcaccttcctgagtctctacttgccaaagaagatgatacctacgaggaggaggcgcaggaggatgaacagcaccaggattaattctatgctcagcaactccgaaagcacaaggtatcagatttgcgaagcgttttttctaccagattgctaggaggtggttcggaggagtatgtgatgagggaactgtgaatgctctttaaagaaaaacaaaaaaaaagtgtctattggggtttagtctcaaggcagtgataaagcattcaaataaaacacaatgaatattgtatttgctattctagctacgtatacgtatgccatattcatacatgccaataaccggggattttatttgtggcgcctgcagtcaactggcgacccagagcccaacccataaatgtctcttctttcagggagcagctatcggttctttataaacagttgattgattctagagtaactaagatcatgccagattggtgtatatcaaagttcgctagaaggatatggtatctagcagttcaatctgtacatgtccatttttatatttcccatctccagtccgggaaactcgatatcaaattggatgaagaggtcactcgagaagctcatcccttcagtttattttattacttcgatgaatgcaatgtctcttccgaagtgggatccctcagtcttgcgaccctatttatatactgacttctcaggtcaccttgagagtttatcttcaatgatcacttgctttttacacaaagcttgcctttacaatcgtttcaacttctattactgtcccacgtcacatagtcatcatgtctttcacccaaaagcaagagaagacctccaacctggtgaaagccctaggcctcacccaaggctagatggaacatttcctaatgggatatctgtgcatgcaaaagcccaaggtatgtgagaaagtgtgttactccgtgagtacttaagcttaagaatcttcatgacagattgatcggaagaagctcggggcgcttagcaaggttacgccttcctccgtcagaactgtccacactaagggccggcgcaccctcgagaaatgggaggagacggtgatatccggggctacgaagaaagccgaggaacatgaacgaatcgatgaggataaccctgatgaggctgtggaggctgcacatgtcgaggataccgagaattaggaaggaatgaatagccaactttgcaacagtcagctagtcttgaggttccagggagctgacatgtgttgttcaagatgaatccaacttatacataattcgaaatccataattgaaataagtacaaaagtccgttataatataggctgtgaccttcgagtctaatatcacaaattcccgatttccacaaataaagtacaagtaagcgttgcttcttcatcctcttcactacacaacagatcgttttccatagcatcaatatctcacaacaacctatcttcagtgcctttgcagagcacaataaatccctatctcatcaagcagacaaagagcccatacatatgtcacccactgagaaaatgtcgaccacgccatcccccaaaaagaagtccggggactggggtaatctcacagccggtgaaatgaagctggttatggccagtgttctatgcacgtctggaaaagtatgcacgctcttaatactgccttcagtcatgactcaaactgactgttcctgtaatttagcttgacaccgacaagctcggaaagctgaccagcatgaagagaaactcggcagcgagtcgatttccatccgccaaacgcaagctggcgaagatgtttgaggatcagttggaccttataggcaatgagaatgactccaatgtgaaggaaaaagcgccagctagagtcaaaaagcgccgtgacaaagttgttgaatcacccgaacctgaacccgaacccgaacttgagatcaagatcgagactgaatccggagagggcatgagcaccgacagccccgtgaaggctgaagctgaatcagagaatagcaaggttgaggccgatgctgatatcaaaatcaagcccgagcctattgactgagtcatgaaacgtgcctatgtctgagacgcagtctctctcaagggtcttgattggggtcttgagaagggtgttctcacataaatttgcctaggatctgtgatttgatttgaccaaaattacccggcagaaggcgtcttaaatgcatctagtttgtcctgtcccatgagaatggctgtggcatatgtttgcctggcaatgagaactcattgcacaataatacgatatggctaccggtaatgtgttcagacatggtgtgacattctagataatggatttgaagtaaaaacatactttgctatgggatagatattcacattcacgggaaacaagataaccgaagaggtccagtgacgccctctgaaccaacataaaaaacgacaaacgacacgaacggccagttaaagtgaaagatagacacaaatatcatagacccaaattatgaatatggacgcaataaagaacgaagcaccaccgaataagtatctcaatcactaaagcgcctcgattgccttcatcaagacatccaagccgcgatcagagacatcgcctgcatttgagtcttcctctgtgacagactcgcgcagcgcccaggccacatcactccaccagcccagacccacgaagccaccacccttacggcgctccaggctctctttgagccggctagtgtgttcccactgcttggcagcagtctccgcacgttcaataattttgctcggaatcccacacatagatgcacagtgcataccgaaactgccttctgcgacaccattctcaagcttgtacaggaaagccacacggcgctcgacatcgtcgacatgaatggccatacgcttgggtgcaatttcgggatgattttcgaactcggcagcaagcgagtggtagtgggtggcaaagaagcccaaagctccaatatgggtagcgatgtgatgaagtacggcctgagccacggcaacaccgtcataagagctagttccgcggccaagttcatcaagaatgacgagtgagcgcggagtagcctcggagagaatcttctttgtttcggacaactcaacaaagaatgttgactgggcagcgaagatgttgtcgttcgcaccaagtcgagacatgattcgatcgactggggtcagtcgggctgactggcagggaaggtagcaaccgatctgggccataatgacagcaacacaggtctatacttgttagcaacatcattaaaataaagggagaaccgaggtggacacaccattcggagaacagtagactttccggcagcattagcaccggtcagcaagtcaatgctagcatgtttgccgccgagctggatgtcgttgggaataaagtcctcaacagaggaaagaagacaagggtgacggagctcttcaaactcgaggacacttcgttcgtcgtccacaaacactggtcggcaactaggatgaccgatggccccggaagccttagctaaactgatgaggcaatcgagctgcgatacaattctaacagcagccagccatgtgctgtaatgctcatcgaaccgggcatggaaccgcccagcgacctccttgacgatttgactgtgggtttcttgggcctcttgcaatttgcgaatgaggcttcggagctcgggaaagtagtatcgcttgacctgcttggtcgcagacatctggttccaattcttgggaatattcttcactttgatgggaacttcgagttggtaaatttccttgccgttatcccggtagcatatagcagaggaccccaaatctcggcgagcttgcttcagcatggcgtcgaggtcccggtggagttgctcaatgatctcctgggagttatcgaagtcttcttcgacaccagactccggaacaagaatcccattctcttttgcctttggacgatcgaatgcggtcttccagtatcccagcagagaggcaagatcgggcatcgctgttgtcaattgaccgataatgctttcgcctgagcccgtgtcactttccttaaggagacccatgatgtaatcgatttgttcgaatccttctaggacacgtacaaagtcttgagccttgcagttgccagcgtggatacgggagatcagtcgttcgagatccggcatctttgttaattgggaggagaactgatcccgggtactgggatcggagttgagtgaatcaactgcatctaatcttgcgttgattttctttgaatcaatcaatgggtggcatacccattgcttgaacatgcgtttgccgaagggcgtaatgcatcggttgagcaactggaagagagtgccctcagacccgccatcgaaggaattggcgaagatctccatgttgatcagggtctggccgtctagtacaagacttgtagccttcttgatgggatcgtaccacgtgaagttgccaatggtgatcaagtctcgctcaatcttcagcattcgcagatattgaaccagagcaccgaatgcagacatcagtaattccttctcgcgagcttgacgcagggtctcgggccaggcagtgagattatcgtcgtccacagagacgaaatactcgcttgcctcaagctcccgaacagtgatatcagattcccagaactccttaccaggtttcatgaaattccagatagtggtgggtccagtgttatttttcagaatgcgcatggccttttgtgaaacgcaagatttctccagtagcaactcccgagggcgggtctgcgcgacaaaggtttcgaacttggtcatgtcaacatcgtccacaaactcagacaagaagaattgaccggtagcagtatcgacaaacgcgataccgaacgcgggatgctcgtccacaatggcctccttaatcgcaacacagtatgtggacatatcatcttgaagcatggaaccctcgaccagtgtacccgcagtaagaacacaggcaagctcgcgtttgatgatcttgtcttctttggtgggcttcttgccctctctctctcgcatttctttacccagcgcggattcagattggtccacacgggcaatcttgaagcccttggccacgaattggttcgcccagtgatctaaactcatctcgggaacaccaaccatgcgcatgttcactctgtccgtgagcttgagatcaaaaagttggtgaccaatagtggcatcgttctcatagagttcatagaacttgcccttcttgaagaaaacgacagtatcccagaatttctgcttgatctcccagtattgtttctcgaaaggggaaaatctagaccatgcgagcggagggatatagacagttcgcgggtcgtagtcagggtggcccttagggttgccgtcgatgtccttgagattagcaagccatgaatagcgctgctcaggctccttgatgtgggccttttcctttttcgcgctagatgctgtcttggtagacgctacagcagctcgttctttccgaggttctgtattctccggatcaaacgcccatcgcatcgcggttccagctgaaccttctccctctgggacatcaaggtcgaggtcatcatcgggtggaggaggagcagggacggaggaagatttagaggtaggcttccgtgccgattgtgtggatggtcttttcctcttgtttgaagatgtaaccgtctcttcatcagaatcatctgcaacgatgaaatcgtccaattctatatcctagtcagtcgtgtaccagcaaacccaaccagcaaaagaataccataccatcatccgagtatcctccatctcctgcctcgttgaactcatcttcgctttccggctcggttcgtcttctcttggtcgcacggccggagacgcggtccttgcgtttaggacggaagatgacctcgtcgtcatcctcgccctcagagtcagactccttgtagctgacctgctttttcccctagacagatgggttaacaagatacatcaattgagcaatcagatgccacacgtacccgacgcgaaggtgacatagtggactcctgttgtgcctctttggtcgtctaggaagggaaaagttcggtcagattaaaggaataaacaagcagcagagtccgaatcaatatacctttaaagaactaccattttcctgttcgtcctctgggactggaaggtcgctgcttgggacgggactcagatcctgcgcaaagcttgagaagcttcgcttttgttccttcggtgtgggcttgacagcgccctcactccgcttctcggaagctctctgcgcgggggaagatgccggttctcgcgttcgactattcgagggggtcgctggtgaggacttttggaagaaaccaagaattgacttctgggttcgcatgttctgggtgctgggagttgtgcgcttgagcgcgggggatggcgacgcagcggacggagatgaggccgatggtttggccatacttttcttatgagatcaaagcaattgagatcaaatgaaaatacactctcaactcaacatagtaatcaggggagttgtgagggaattggggacgggtggagataaggcgcggatcgcgtcgacgcgtaaagcacttcgagactcgacctatccattgatcgacacccgtgaccttgtcttttctccacctgttatgagcacttgcgaagtcttatttgtctttatgaagatggcttgataatatttatactattgtacagattgaatattgtagcattacagatttagtggagattcgccttagtccgacttggtcggctcagtcggctcaatctactcagattcagtctcccatccaggagccgtgagaccttgcgcacgatattcttcatcgggcacaatgtgaacagccttgagcttccacttgcccaactttaacattagaaggttgccgttcaagacaaactcctttgttttctctgcgtcccacggccggataggtgtgaaggataattggtctgacatggggccactatcaccaggacggctgccgactttggcgccattgttgacgatgactcggtggccctcgctcttggatgaaacaaggccggctgaccatagaattttattgaacggctggttgaaaaccagcgattcgggcagtgtgaccttgaaatctcccatgttggcccaatttgtttggggggcatatggatttccggactgaggagtcgagaagccagcggtgggggattgcggatgaccagattgaggagaggatgacttgggaagaggagtgggctctgcggttgaggatcggggacggaatagctggcgatgttggagagccacggcatcagcttcgaccttaccatggataagctcgacaaactcatgcgcgagcttgtgctgcgcaacgcgctgagatgggtccttgttctgctcctccatgatggtagcgatttcaggcaagggtacgaaagtgaacatcttgagatattgctcgacaacatcgtcaggcgtgcgcacaaagtactggtaaagttcgaatgtagaagtcaggtccttatcgagccaaacggcgtttccagcagacttgccgagcttctcgccggacggggttgtcagaagcggcgtagtgaaaccgatcgggcgatctaattctgattctaatggattgcggagttgttcgtcggcagtgtttcggctgatagacttgacagcctccataccgaacagaatatttccatattggtcggcacctccgacttggatttgagtgccctgttggaacagcgtccaccaatcccatgcctggagaataggataggaaaactcagcaaatgacatgccatctccttggttcaatcgcgtcttgacactagtagaaaagttcagtaaacccgcgtcaacagcactgtcggacctgccaaaactcacgtatctctgccgagcatgggaccaagtcgcatgaaagcgccaaggtctcgcaacacttcaaggaagggcatcgagttccaccaagtgttgttatttgtcaacgcccgcttccacattgggttcttctcgtgtccgtgtctcctgccgtagtgctcaatgctcgagcccaacttcttcaactgcatatgcatgctagccatgtttgctttccggattgaggaatggacagcatctcggcctttgaggcgcccgctggggtcgccgactctagaagtagcaccgccgagctatggagtattaggttggtgcattcaatttggcgtgaagtaggcaacttactagaaatgtcacaggtaatccccagacatatccccaggccagaaccatgaaaggaagcatgtgtccaacgtgcattgagggggcagtcgggtcgactccaacatatattccaacccgcttctctgtgaagaccttgtgcaacaagtcccgttcactgtaatcgaaaggaaacgattagcgagccattcaaaacctttccggcagcaaatgccagcaacttcattatatcctagtgtgcacatacccgacaacatcatggatcaatcctcgctcttccaagtgttgcgcgaagttcttcctcttcccggctttgatctcctccgcgaagccggcccattcctgctccccgtctttcatacgctggatatacttttgtgtaatccatctctgctgttgaaagcatgtcccggactgcaaggtggacaatactggccgattgctgtcaccgcgcggcagaatcgctgttgttgcggcaaaactgcgcgctccgcacgggatccgacggggtgtgagaaggctgcggtatggcgctgggccgagcgatgccgactgtagtcgcattggaccggtgtgagaatgaggatattaataaaacggctcacaatggactcgagtctgcacacgatcaacacctccagggccagctccagatgtccgagattctttcgatacgtgcggaacattaatgatgcggcccttatctctgatatgttgattgatttcctaatttgggctatatttagggcttagggccagagaagtacatggactgggattcagatccgtgattgtagagaaagatgccatgttggaataatactctctccatctagcaaacaaaatggtaaagtctttaaagacgactggcttcaagtgctacgtcaactcacaaaaacctgcacgaatgcctcgttactccatccactgtccaatttcatcgatttccatgccgccaatatatcgattgccaggacattagcattctctccaccttgtttccataccgtattctgtggaactggtcgtcccaaaatcatgaccatgaagtttcgtgcaatgctcctgtcttgaagatccgagaaatagatccccagagtgcccagcgcttttaagctgatgtcaactcgtaaacgaccattctcaacaacagatatatctgaagtcactatagccgctacaccagtcatctttcccaaaagaccgagcacagccacgtgtgtcagacggtcaccagaagagttgccgtcatggctgcccgtcagcatgaacgactgagtcgggtaagcagtgaggatctcccagccctttggccccagaacaactgataccagagattcccggctcaacggccgcatgcgatgcgatatcctaccgctgctgtgtgcacgcacaatatactggccttcggagtcctcgtgaattcctgggaaatccatcaatgggactatgatcgaggcctcggcagattgattattgaaaacgcctaagattccacttccagtcttggcccagccggtatagcttccaacgcgcagaacacgtccttcgtcgtagtcgttgtatatgtctatcgtgcgtccaatgacactaggacgcaagatcaccgtgattcctttgacagtaggtgcagttatctgattgagtagggccaggtcatgtttacccggctcatcggtgatataaattggccctccggatacacatcgagctgcagcgtggaatgacgcgtataggtgacttgtttggaacatatcccaatccggcaatacgttcaaatatcgggtgagtaatgcattatgagcattacaaaacacatgccatgggtgagaggcaacaacatctggaaagaagtcgtcggagtttcgcaatggaatagtgggcttgttggtgggcatttgtgaatggaagattatttgaggggtcattgacccgcatgagattgaccgagtgctcaagtgcttaagtgatgcgatagaccatgcatcttgataagaagtcaagaatcttcggcggtccgctgggtcatcaaggaggtcaaggaagaattgtgcatctgtcttgaccgagtctataccaacagacgtaaggtagtcatagaactcatcgtagaatcggttgatatcatcgggatcaatggcaacgattgtgccatctagagggctctccgtgaatgacccattggcagctgcgtctttgatcttcacttgctttgttttgaatttttgggctagatccccatctggtgagatacctccccaataacccagcaaggcatgccagaccgcgatatggtcgatatcgggatgtgatcgacgaatagctcccacagtatgcttcaatccttccggaaatcctttcgggtgtgcttcgaactgcttccagccttgcttgaactgagactgcccttcattgtcggttgtctgccagccatcatcgataataagattgacgatgttgatcccattcgccttcaacgagtctaaggcatgcaagatcttctcttcggtgaggtcctgtccaagcccattccaggtacaatatgtgagaccgtcgaaccactcagaaagccactgtgcactcgggtctttctcaacaatgaccatatcatcaccagggggagatagtgggaccgaatcgtccaaatccagattactcgtatcagcaaatggcctgacgactttccgtgcctcataaaccactgcagacatggcaacttcaaagttttccgctgcgctaacaagcacatggaattcagatgcttctaaatcgtcactttttgcggagatcacgacttcaccgttcccacctgactgaaacacggtcaaaacatcgttgactccagaaacggccagtagaacaagattcacgccatcatcacgcaggaaagagcaaaatatcgcatcttcagtaagtcgaaatttatctttgccatgtctagggccaagccatgcgctccccacacgtactagtgagaagtacctcaccaccgacgaagcggtcccaagtgcaagttgtttgatggttgaagatccatttcgaacagcatctgtatctccagaaagagcccagaggatcgatccaggagcttcactgggtcgagactcaatccgcaagtcaccatgaagattatcgatgtacttttctagttgctctttgggagctcgtgcagcgacaccagtggacacagcgttgtcaagatcagagtagcgtgcactatatagaatttcaccgtcgcccaccgggtgtctttgattagcccactgccattctgtgtctgggctggttcggaaccggactgtgaactgtgcatgacctcctggggctggtaggattatctcttctgagaatacatagcgatgatagttgtactcttcatcgtttccggacaaaagatcagcatgatctgtgttacatctttgcaatggcagatgttcccattcggggccagtgatgttatgccagatctgtgcttcccatgattgttcggggaatgagccgctggactcgatagtgaccgtgaaacgtagctgttgacaattttagtattcctttgcattacaccctcaatcatttcagaaagtctggcaatatcagatatgaccatatttgggggactcaccgcatcttcttccaatcgcgatgccttcttcgccgtttggagacaagtgatttgtcccagcggaggataggatgtgacacgtgcaaacatggccatttgagccggataaacaaatgatgcttgtagctgtcgtgcactttggctagggccctggattgggagggttgaggtatctctattaatgacctccattgaagaaaggtaggttgttggatgaggtatctcgcccaggaggcggaaataagtattaaaaaaagattatttacgaaatgtctcacaagagactatagaaaacttgtatgcttgagtgtaacagaggaaaagaagcaggtggttggttttaactcctgcaggggacggaagtggcggggaagctaccactgtccaaccagaatgagcctcacctcatctcggacatcaacatactattttcgaattactaccagtttttaagttgactgccttcttgaaaactgcaaagacactaggatagttctaagtattgtatgttctccactaataaaaacttcattgtttatttgagatttataaacaggatgaatgaacataaaaaaaaggtaaatgagagaacgacaagagtcgaaccggaacagtccaggtagtggaagatcttaggcacttccctcgtagtacacgcaaagcatgttaccactgggccacccgctgttgagtcatcagtagtagcttccttttccttgtctctcgcactttccaacattagaaagttgtcacaacggatgccagcaagacttatgttatattaacgctgctccctagcctcttttcattccacttcttagttgatcttgatagtcaactttccaaagtgcttctgggtccactgaatttcgatctgttagcattcaatccctccttcctaattaaaaacaacttaccatatgatcataggcttcccgtgtctggtcaagggtgaacaccttgtcatccatcaaagggtggatatcattagcctcgatggctcggaccatatccctcatgagagctttgctaccaacataaacaccacgcacagtgcagatgtgagtcaaggcctccaaaacaaccggctgcttcttcgggtctacgcctgaaaggaacccaatgacactaatgacaccgtcgtacttaatacacttgaagctctcatgaagcgttccgctgccacccacttcgacaatctggtccacgccagctccgtcgggggtcagcttgcgagcagcatcgccccagttaggctcagtcttataattgatgacatgatcagccccaagcttcttgagcctctcggccttctggggagaagaggttgtcgcgatgactgtcgcaccagcaactttggcgaactataaaacaagcagcattagccaagtctattatgaaggagagcagatgagtttggtactaacctgcaagctaaacatactgacaccaccagttccttgaaccagaacggtctggcccggcctcagaggcttcaggccatatagtgcattccagctggtgagcgctgcgcacgggagggtgctagcttcgcggacatcgagattttttggcgccttgacaagacccagttcattgaatacgccatattcacgcagggtaccgtcgatcacaccacctagtccagtattcgctgcgtgtatgtcaatgtcgccgtattggtggccctgattgaagagagtcgcaactcggtcgccctttttgaattcaacgactttggatcccacttcgataacttcgccggcgccatcagatcccggcactacaggcaaattgagaggaaatggatagaggccctgtgggagagaagttagaggccggttatggcaaagtaatggtgttgcgcaaacaattcagtcaaagtataaaatattggctttctcgtgcaaaggccatacctttggaatggttaggtcgcgatagttcagcgacgcagcttggagcttcaccaagacttcattttcaccgggtttgggaacaggaacatccttgcaaacaagaccgtcgaagtcatgtttgtcatcttcaacaatccattgtttcatagtggaagaaggcattgtactaaaatgtatcaatatattcaaaaaagtatactacgtatgacaaaatgagtatgggggttgggggtttatattgaagccctctgacgtatttgacgtatcggcagatgcatccgtccgatttcagtgaccttatgacgaaaggattattaagaaggtggatatctgcttcatgtttattggtagccaagagctcctatacaggttttatgatgtgaattattaactgataggagatattacctttcgaaccttgggatatatatcaaatcacaaggttgagtagggaaatatgtaattcggtgactcggctgctgcggatcatatatccgctaataaacaggtgatcttctcacagcataatggccttgttagatgcactgggattccatgtaggtggtttaatccggcgaacatggtggcataggcgtatccagggagaagagcaaagagaatgagactaaaaggatttgatattcaaagacggaaggatagcaagaaatgaggattgttctccagggatgaagaaggtaaaaatataggatgaaggacaagaaggggataactatatgtatgacaactcaaatcgggcatataacttcccgtcaaaagtccggggtcccggcccctcaccagaacatccttcaactatgaaacgcaaaaccctgtcatacaagctgaattaagagactatcttcctctgacatatttttgaactatgccgtccgtgaaagaaggccgagtcgagaaatttaaagccaaaacaccgcgaaccacaacccgacgcgtgtccagcaaaagtgagtaaatacaccactgtcacaagcatatttcatcctcaaaacatgttttattgatttgctttaaccaaatggcgacgcgtgctaataatcccttagtcccactggttgaacagaccaacgcattatctattagcgacttcgtcgcccaatacgtgactccaccgacgcaagtaggagattcagctgaaaatgatgcgattgatcaactacatccatctcaagatcagccacagcaggatatgatccccatgtcgctcatggatgtctactctgcggcaactatccccgcggctgatctggaagcatgtctggatctgatcgagcaaacctcaagtcaagcctacatggcgtcgaacgcaggctggtcacgtaccaagaagcggaaggagatgaagttgccagatatgaagtatttgattttgcgggacgcgccgaatgataatagtgatcctagtgggcgagttccgagagagaagcagcgggatattgccgacaacaatgctccgtctccacccccgaaggaacgcgaggaatctatttcatcgcctgatactgtttctgggaacgtgcttggctttttatcatttatggtcacatacgaggacggaaaagaggttgtttactgctacgagattcacttgtcgccgacggcccggggacggggcgtcgggaggttgcttattggtcggatggaggcgatcgctggtgctgtcggcttggagaagtctatgctgacggttttcaagtcgaatgaaattgctcggcggttctatgagcggcttggttatgaggttgatgagtattcgccccgaccgcgcaagttgcgcaacgggactataaaggatgttgactatttgatcttgtcgaaaattttgaaattataatagctggatatctctttgttaagggtttgaatgctaatagtggatatgaggatagtggcgtgcatacactacacctgtcgcacctctgtgcccacttgctctgggtgttcttgctcccactcgtctctgagagcggcaaagatggtgtcggccaggaggatggagaggcccaaactccagactagagtgatggcgtagaagaaattggcatttccggatcctgcgtagatccaaaggtggtagaaagccggaccgagaagactggagtacaagattgccgagcccgcaaagaaggtataacgcatcactgtaccaaattagtcaagttgatcctgagatatgctcaattattggaaatactcacatgggaaaaggtggcgatataatggtagcaatgcgaagaacagtgatgcatctgagatgctagggtatggcttgaacacggcgaagacacccaatagcgaggtaatcacgaataatggctgacttcggaagcgagcagtgagacccccgacatagctggccaaatgaagccagaaaacgccgaggaagaactctcgaaatgagtcgaacatctcaataaaaaagtaccaccacagccccacgttcggagtcaagtctggaaccaaaagatggaaaccatatgttgccgagataaactcccaaaagttgccggtgatcagacaggataggccaagcaggcctgccacactggctagcagtaggatagcatgttggataatgaacgatccagcactgggtgggctaggtccctccaaccgccggtcatagcatagcaagaccaacgggataaatagcagcgccgggtacagagacaggtatgaagcaaatccaagggctagcatcgcattgatgctatttccgccgactgcattggagatggcgaagaggattccggatgtcgtaaatacgctggttgaccgcgctaaacatgtcgcaatagtaaggggattgaacaagaacctatccgtcgtaagcatgtagatatacatatgatggggaagccagagatttataccatgctgcaacggacactccatcccatcgaacatgttttcggactgctgagtgtagtctcgatttgactgactggcccgacgcagatatagtcatcaatgcgtacgcgttcatgaggtcgacaaggaagtagaaaattgctgttggcaagggccagctcttcgcatccgggagtagggcaaacagaggtaacaggagcggtgcctagatcatcaaattgtcaattcaaggaacggagtcgcagggatctagttccacgaacctggtggaagacgccaccatcataaggcgacacatttcttgtgtacaagaaaaggccttcttgcactacatgcaattagtttacagaatgcggagtcaataatcggagacacgtacggcgtttgaagctattaacaggtgttgagacttcgactctccccgttaacaaatcaggcaatgaaggaaaaagacatgtaagaagcagacgcagcacgaaagctgcgccaaatacagcaatcttccgtcggtctacagccatgacggggtgagggtttggttgttgattccagctggtccccatggagccaacgctctccgccttcgggcacgggccactttgttgcggtaagaaaaaaaagttatcgagaaattttcttcttcttatcagcagcccgtttagatcttttgacaaccacttttcatcatgggcaaagttaagaagaagggtatgttgaaatgaaccggcaatttcaattgaatctactgaccgtccttgcaggtacctctggcgcagccaagaactacattaccagaactcaggccgtgcgcaaacttcagatctctttgccagattttcgccgactatgcatcttcaagggtaattgcctcttctatcggtctttcatctgaatcgcaagactaacatgaattccgatatcaggtatctaccctcgcgagccccgtagtaagaagaaggcctctaagacctctacgcccaacaccaccttctattacaccaaggacatccagtatctgctacatgagccgctgctcaacaagttccgtgaccagaaggcacttgcgaagaagattgctcgctctctcggccgtggagaagtcagcgatgcctcccgcttagagaagaataacgctccgaagctcaccttggaccatgtcattaaagagcgctacccgacctttatcgatgctctccgtgatcttgatgacgctctgtctcttctcttcctctttgctacccttccctccaccgaccatgttccttctaagaccgttgcgctctgtcagcgcctttgccatgagttccagcactacctgatcatgacaaattctctgcgcagatccttcctttctattaagggcatctactaccaggctacgatccagggccaagacattatgtggcttgtgccataccgtttcgttcagcgtgtcaatggcgacgtcgattaccgtatcatggctacttttgtcgagttttacaccaccctgctgggcttcgtcaacttccgcctatactcctcaattggattgagatacccccctaagttcgatacccgcagtgacgagaacggtgccgagttggcggctttcactcttgagggccggacagtcggtcaggtgcccaaggctattgaggctagcaaggctcagagcaacggcaactctaacaaggaagtttccaaggaactccaagccaaggttgacaaggtaattaagaaggccagtttggaccagaacacggatgaggagatggtcgacactaccgacgaggcaaccgatgccatcgaccacttcgagcccgctgctcctgaagctgacaccctcccccaacctgcgatgagcggcaacgaggccggtgcactcttcgccccctttgtgttctacatttcccgtgaagcgcctaaagcccctctcgagttcattctccgctcattcggctgcaagcgtgttggatgggcctccgttctgggtgatggagctttcactaatgacgagaccgaccctcgcatcactcaccaaatcgtcgatcgcccccaacttccccagggatctcttcccgccattcctgctgccgatgagaacgctgtccagaaggtccagcctggaacccgcattcctggccgtacctacgtccagccccagtgggtctgggactgcattaacgagggtaagctcctccgagctgatctctacgcacccggtgccactctcccaccccacttgagcccttgggtcaaggctactcgcggcgcttacgacccgcgcgccacccttgccgatcaggaggaggaggatgaagccgagattgccgccgaggcctctgatagcgatgaggagatggaggacgagcccgcggctgacgctaagcctgctactgctgaagagtccgaggaagagtctgtcgatggaggcatggatgtcgccggcactgacgacgagagcgaggaggagtctgaggaggaagtcgaagacttcggcggctttgaagaggaagccgcatccgagtccgaagacgacgatgaggctgcccgcactcggcaccagaaggagctcgaggccgaagccgctggtctgcctttcaccgccaacgccgccactgatgaagctgccaagaagaagtcttccaagtccaagaaggtcgctgcgaagaagcgtagcgaggacgaggagcttgagagacagaagatgatgatgagtcggaagaagcgcaagctgcttgagaagatgatgtattccaacaagaagactgctgatgagtccgccaagctccgctccaagagacgcaagcttgagaagggcgagaagggcgagaagaaataaagctcggatcatttgtgcatgttagatagtgcttttgccgggcgttgcggtttggatatgtcccatgtataggcacctcaaaaattttgtgaagttttaatgctatttacgggatgacaccccagttatatgtatacctttgcccctgccatattggaacaacacgtttatcgtaaccctaggctgtgacctcggaagtaaatggtctttgaaatttgcgtgtgcttttcccatgttgccatccacgcgaacacgcacaactcgattttggaaatggaattcaggtcgcttgctttaaagattgatagaaaagtcccgtgtcgtagccatgatatagatgcagatgctgttgcacccacacgtgaagaataccatgatgtcgaaggtcgacagtaaaacgggctgcgatcgttgacttttgtgggatttcctagtcatgttttatagcaggttttcgttccttctgctgagaatattttctaggtcaatcaccttagtccgccctgaatctcggtatcaaggatgttcagcatggcatcagttgcgcccaaggtagcggtgcgagattaaaagtggccgaggtggtactggacaatatagtacgagcgaagggcttctcgaatgcgtatggcggccggccttagattcatcgtctgggtacggtatcgtacgtctggattctgggcctagactttgagaatacctttgtgaaggaacgagattgaaaagacggttcgtccgaataatacatttacacccaggctcggagaggacgtatgaaggccctcgggatcacttacaaagggtggaatatccaagacgaagcaaactgacccgcaggatatcttcttattcgtcaaaagtcaccattcggaaactccccgcggttggtgtcaaggttgcggctgatatttcctaatttggaaggaaggtccgattaagctcccgaggtcggatataaggctcggggcctactcttgccgatcaacaaattcaggacgatgaaaatattcatcagattcatagctatcgttttcctcactgtaatcactctcttgtacctctccattcggtcacaaactcaccggccaaccgtcaccgaaatgtctttccggttacatctcgttcggcacgcagaggggatacacaaccccggccacgacacaaccattctcgatcctccattgacagaaaaggggatcgcacaatgcctgaaactctgcgaagactttccgttcaaggagagtgttggcctagtaatgacatctccgctccgacgcactcttcaaacagcacgtctgggcttccaacaaaccatcgatgagaagttttacgcccaaggctccggggcaggagttcaaaatggagcaacccttttgttagagccagatgtgcaagcacactccgctcggccatgtgacactggctcagatatcgcgattttacgttcggagttttacgatctcccatgggaaatcttggatttagatcccacattcccagcaaaggaggggctttatgccagtgatccggagagcttgagtctgcgcggagcacgaattcagcgtcgattggagcagaaatttaaagaactgaaggacagcaaaagacctgacattgccgttgttacacatggcgggtttttgagctccgtcatcggtcaggagaaaacagaagtcggacaagcaaggtggaagacgttcatggtgacattcgatcaggattcgagaattgattcgagaattcttgtggaatcagagtgagaatgtccaagtcgttgattccgttggtgcatgaaatagaccgaacctgtgcttttccgcttagatttctttttctctttgtaactatcatatcggatgagaaataattcaccatgtccaaacagcagaaatgtcgaaataaatttccgaagtccgcatcagccctatctccgagtctaaaccacgatctacaaccccacatttatacccgacaggttccaaggttacctcctgctaagatttcgaagttaccatccgtggagatctgaggatttgatgtccgaaactcgtggtttttgcaagaatcaattactggtagaaaaaaagacaaattcgatgctagtgctcgccgtgtcacgatctttaaaaccctcttcgatgaccttcatggatttatgttggtaacaacagcagtcaggcatgggaaagtgccggagagctcagccgcaacctcagcccgccagcacctggcgctggctctcgtgttcaatgtgagcttttagtgctgagcaatctgtgaaacctttcgtgacgcctactttccaaatgtagtggacaacataggtcggtctattttgtgtgaatatatatattgtggctacagaattgccgatttttggaaactaaagagcaatcaatatcctttcgctgtactacatgcgaaacaggctgggctgggctgatattggcacttcgctgactccggttggtcatgtctcacggttccatcgatatttcatctcaccagtcgttatcaataatacttcgaatgtaatccattgtcgctctgtaatctatgtggcaaactgagaatctgatgctgttacaaattctagggcgtcgaacctagaaaagcactgtccaggaatgccgactaaagcaatctgaattcttcttgtcgaggtgctcatttcctgtagtagtatatctcgatccgattttttaagctgaggcctcctctcatacagacctctgtcccaggccggtatctcggcgaagtgtttaccagttcacgccgaggtccaatatttcttctcgttgagcatagaatgcaaccatataatacatatgtagctgcaagtggcaagtttgaaatatcattctgcctcttttaattattattccatggattcgacgcccctggcatggcaaatggcgtggttagggttactctaggaagtatgcagagtctacccttgttccaggccctattccagacgctcttctgacggtcaaactatcatgaagcaaggcaaggatgttgagtattcgttgaatatacaggcactaaaccaataattgtaaggtaataagttgttgtcctgctgacgggtgccattaaccgaaggattctatcaaaatacccacgatgaatggattatttgcaggtaaacaattccatataacgttcaggtaaacaccctcaaacctatggctaataattatatatatagccacctatatgtaggtcgcaccttccaaggttccatccccgcattccatattagtacagggacaacttttgatttcgagtaacattggaagagccctggaaaaaccatcttcccctgagaccattgtatttctaaaattgtcccgttcgaaatgcgtttgagcattattactgtcgtgggcctcgcaatcgcccctgtgttagctaattgcccttatgcccgagatgcgggtaccgaggttgacaacagtgctaaccttcatgctcacttgcctcgcgatgccattcgaagcaagccaaccacaggtgttgcgtctcctctcccttccgcaacagctgggaaaaaaggtctgctgttgatgaaccgcattgcccccggtacctcagaattatacatcgccaacgcggacggaaccaacgagcgtcctctgttgaaagatcccggttatgaatatcacgctgagttttctcccgacggtgaatggattagcttcactagtgagcgtgacggtgatggaaactccgatatctggagagtgcacccagatggctccgatctacagccgattgtgaaatccccagcagcggaagacagcgttgtcatctcacccgatggaacattagcagcatatgtttcaactgctaacaagtacaacgctaatatttgggttaagaacttggagaccggtgccgagtggaacatcaccgataccccggctaaccgaccagatgaggacatgatgcacgggcactttcgtccagcctggtcaccagacggagattggcttgcattttcctcagatcgcaacacaatatgggatggccacggaaaacctacgtatcttggcctcgctggctgggagcatacccaagaactcggcatttatattattcgccccgatggttcagatctgcgccttgtcgcccaccgtgcttcccactgccttgggtctcccaaatggtcacctgatggcaagcgcctcatattctacgagatgactcgtaatgggacgtgggatgcacatagacctgagctcgtggcagatggtaactccacaattgtgtctattgggatcaatggcattgaccgtcgaaccgaggttggcggtcctggtatcaagacctttccccagtacgtgacgaactccaccattgggtaccatctgaagggcggcgataaggagggcttgtatctcacaaacggtacttacgtcaacaccactattcgctctccctcatggtctactgatggaaagtatgtggtttacgagaaagctgtttggtctatccgccctctcttcaaggagctttacagctgggatagcgaatgggattaccgcttcactgatatattccctcaattatcgtcgaacgaccgcgtggctatgactgaaaagcaacttggcaactcctccattgcaacctttgatctagaggatagacatgcctccttggtatataagcctaatgatacgagtctaatcgacactactctaattggagaaggcctggccggggcctacaatcccagctggtctccagatggcgagtggattgtcttcggagtaggtgcctggtttgaggcgcgtgattggcgaggaggctggattttacgctccaccgcaaacggcagccacaccgaggtcctcaccaccagcaagctctttatcaatcaaaccaagtacctcaacaccggctttcccagcttctcgcacgatggcaagaaggtcgtctaccgcgtgtggggtgccgagaccgccaagtacggcgacgaaacagagattggtttacgcatgatcgacattgagaccagagagattacccagcttaccagcggctgggataaccttccctctttctcgcccgatggtgaatttatagtgtttacccgcaaggtttctccgaccaactacgacgtctgcatcatccgccctgacggtactgatttccgcattctgacttccagcggcgccaacgatgcccacgctgtttggcgccaggatggaaaaattatgtggtcctccggcatgtatggattccagtatgagtgcgctttgtatgaggagactttccagccctacggtcagatcatgatcatggatcccgatggatccaataagcgtgctttgactaattccatttgggaggattccatgccgctctttcttcctaacgattggttctagaatgcggcttgaaaatgtaaagtagggtggcttcgccttgttctctcattgatcatgtccctttccattcgctttggataattaaatagagccgtctgtctatattactatgaaaattttatcattactctcttcaagatgattgtacgtctgtctgttccacgttccattgaacgaaatatagataaaagtcaggagaatggtgtaacttaatcctttgcgagaacctaaccctgagggcgctgaaaaatagatcagcccggacgtatatctgttcgtagaggggctaagttacagaccacatgttgttttttggacgcaaaccgcgctcactactacctacatatgttccagggtagcacaccagcctcttcagagaaattcatccttatctacttatagaacttgaccgaggataaatggccggtcgctaaactgtgataactctcagaaatcagattagaaccatacactactattttgggactagcgtacatattctgtaatatatcgatcacgtgactgtgccgatgatccactcgatttttgacatcttcaaccaggaacaatcgaactgtcggacaggagacccaaaattcaccattcagagtctcggttacagagggttgggacagtggttgttcctttgacctttagtcggatgttgcctaataaaaatccgcatctatgtgacatctaggcactccagatccgaacctttcgcccataagagaccaaagtttcttcccgtcatgtcatctttatatgggagccagtctacttggccagaaaatattccaccacaatctgcacagccgcaccgatcattatttggaggcccaagcagtgatgtcttgcaaccttcttctcagctagaaccgccaagaagttctctttttggaggaggccccatcgaacaagatgcccctctagagcccttttccgaagcagatcttatggatgaggagctagaccaaaacgaaaatgaaattgacgtgataatgcaagggcagcccttggcgttacagaatgactctgatgacgaaagccagggaaataatcgtggcagaagtcgcatacactcaaaaagggcacaggagtctccacttgacccaatctactacgtagttgatcgaggtcttgacctgccacctggagttgagcgtcctaatctatttgacgggcacgccacttcgtggaggaactacaacgccgatgacatcggagcctataatgcaattgttaccaaccgaaccagagatttggcagctcatctttacaatgctcacgtggttcgcaagcgagcgcaggacactgcccgggagaatcccggggtcgacaaagtgccattgcgtgtgaacaaacgatgggctgcatggcctgttcatgcagccacagttccccgtgccaacgagatcattcagagggtaatggatgcctctgataattttcagatgcaacccgatccccgacctagtgccggattggaagaatgcatcacagcgttcatactgaagacctccaaggagaccttccaagcccgagaatgggattcggaagaaattaaacataattctcgaaataaaatgaacgacgggaaggaactgatggaagatgaattggggaaaaatgaagagaacgaagaagcgcgtgttgatgtaagaaccctccgaccgacagtcctcctcgacgacgacacagccattcgccaattacgtccgttggtccgcaatgtgatatcgcaagttgaccggctgctatacgggctccattgcgcgatgaagggtcgcaagttcgaggaagaatctggtgaagagcaatggagtgattcggacggagaccatcagacccgacacagccgcaaactcagaagcaggagtcgatcacgtggtcggagaagtgctcgacaggagtctcagaagcgaaacatatcacgtccttccaacagtgcacatatatccactagaccggagacaaaggatgaaaatctgccaaacgtttcccacacccgagcacaatctcgtggtttctctactggccacgagagcagtcatcacatcaatggccgactcaaactgcgagactggagtgaagttatgggactggcatcaatgattggcctcccaagctccgcggtaatgcgtgcgtcaaagcgatgcgccgaccttttcggtgaagatatggaattccgaataatgcccgaaggccgggtaagaaaaagaaaaaaggtagatgctcgagaagaatatgcctacaccgagagcgcgagcgatagtgactcgaagccactaagtgttcagccaattcctcggccagtcggccagccaacccgcaaacgcaaaaccgaccctgggctcggacccaaagccaaagcgaagattccaggccagcgacgatcgaagtcacacatgacccctgcaattgttccttcctcgtccccagccccggaagagccaacagaatctagagaggctattgcagaaaacacaagacgagccatcgctcaggggtcaaggacggttaaaccaggtgttggaaagggccctcatcgaaaattggatattgtctgtcattttaggtcttgcaatcgacatacgaatggattttcgcgaaaatggaacctcaaccaacatttgaaaaaagctcatggtataaatgttgctcctgggaatgaacgttcgattgagcgggatgctacggtcattgtgctcgattaggtattccattttaattagcaagctcgaaatcgcacaatctgtattagcgtccataaattagtgccggcttgatgaagacgctttgaattctgcatttcggactggtgtagaaaaacaattccagctcctgattagtgagctagagagggctagttacaatgctacgtcctgttataaaagacgcagaatgaaggaaaaggtcttgattatggtgccgtcaatgaatgtactcgatgcttttctttccttttttcaatagctaaacctcacggccaagacatgtatggcttcggtcctttgtttgaattcttcttttcttttccctcttgataaccaaatgactgactgaatcaaggaattgtcttgcatacttcagatgtaccatgagtcgagaccttgttgcctatactgataggcttggttttgctgcggaatcggaggccattcgtctttccggtacttttggttgcatctcgattcgctgatagaagtagagacgaccaccgaaaggcaaggtctttgcgctccaagtagcggtccatccgtggaagggcaagtcctaaccagagcattctttcattatcccagaagcttacaccaaacctctggaattctccgcggaagccggcgattttgacaccggactgaggcaccgctgagcaattctgtgcaaagaagcaacctgggaggtggatgtgttggagattatccaagccacgcgagcgttggcagtcgctcagcgaggtaaatttcgggcaacatattgtaaactttgctgctcgcttgcgtgatttgttttcgtgcatccaagacagcacagtctctagctgttctatcggctctgttctcatccaaccgtaacaggcaaaggtcctccagaaatcaatcaacaaattcccctgtagatacatcaacgtgtgcgggaacttcgtacctgggggaggagaattggtatttagtagccttttctcgcagacgattcgccgcagtactgagaagatgtatggtttcaagaaggcttgcatcagtcgctgttcctccaaccaggtgggaggataccctccctccctggtgccgatgtgaaccggaatcccgggaggtcgagtcccgttttttggccacggcgacttccgattctcgaacttctgtatatcggcagacaagcacagagtcatagcatcgtggaagaaggcgtgtgcatccccgcgaatgcgacttgtaaggcttagaagataatgaagaatctttgggggagttgagtgcggaagtcgaatgcagccgaccttgattggctcactgaagccctctcttgctatgttaatgctgtagaccaattcatcgtgaaaactgacgggtaatggattatcatccgaaggaatccctgaagccacggactcttctttccaccaaagatagaccaatgtccggaagaacacacgggtatcttcgtttagaccccgctcatggtcccactgatcgatgattctttcaactagctttggaaagaatccaattttgtgattgagatagtcggaaacagcaggtgaagcttggcacaattgatgcaaagttggtaagtctggcaggtgaaggagaagctcttcgagaccgaaccatggaagacgtccgaatggatccttggtctctgggtttggatcgagagaacaccgaagagagaacgaggaacagagctttgaacccactgaaagcgagggcggacaatcatcgtatctatcgtccctagtggcaggactcctgatgtgctgaatctcatcagggagagtagagttagcgtgctggagatttgaagtcatgatgctcgattccggaggatatggggcaaaagagatgaaagggccgaggccctagcttatacccagcgaatgaatagatgccgagaatctgatgaggtgtgttgtagtatgtattctcaaaggcactaaccttcaagccaagcaacgtaaagatctgttttgggttaaactgggttcaaaccaggattgtggagcttggtccaatggcataaaaggtgctggataaagtggtgaagaagggatatgatgatgaaaaggatgaagtagtgaaatgaagaaggttaatggtaaagatgggtagggtgaagaaggaaaatggtgtattattgtcgattggtctcgcgaggtccaatgattccttccaaggcggtacgagagtgttggtttcatgtttcctattcagatacttatagaagttattgcctaggggaccacagtcagaatctcatctgctacatccaacggctttcttagggcaaggcatcctaaaacggccaagaccaaaacgaaaggcttggctaagatggaaggaaaatcagtagagtcctgttagcatgcaattacctacttatacatagtagatgaggccaaatgtgtgtcagatagtttcatatcgcgagtgagtagtccttggatctcgccagaccgtaacctattggcatcctagggtatccatactgctcctatcagagctatagtgctttgacagtaagtttattcagaagggtacttatattagaggatagtatgtacttactatgacccttctcccttcgagggtaagtcgtggatgagctcggggtattacacatacactatctcaaggccggaggttcattttctattttgattggctacaaaccccgtattttatcacagctcaaattctcattggctcatattaccgagtcctgtaataccgatttccaaattaccgaaattaccagatctatgaaatgaaccattctctacagaaagaggtttctctatttcattcaatttttccttaatcgaacttgaaaaaagacaatacaaaatgcaacagaacatcaagcaaaacaaaagaaacaataacaacagccacaacaatcacagccgttgatctatgccgttatgtgcagaatgacatcaactccgcagatctccgcttgaagctatggagcttcgaagattaccagaatcgcattctttagcacattaccattacacatattcggtgcttctcggacgcagagagcaatcaccattgagctaacccccactagaattgctgaattgctgaattgctgaattgctccctttaaaggcatctccaactctcctactcccccgcaattttctccatcttcccgtgtgatttctctcttcaaggcccaacctcaccttgatttataatggaccgcatcatccgccctgtcgctcgccaattattgagaccccgaccgagatatcctttttcaattcctccgacagctcacgcacagagattatacagcatgaaacacggcgcgccgcaggtaagatctgtagtcgaatgtgatttccatagttcgtactgatcgattacagttgaaagaccagtcgcttttcattcagaaggcgtacattaatggcgagtgggtcgatgcgaagtccggcaagactttcgatgtctacggtaggtaccaaattgaatattcgggttcaaggtggtcgctgacttttcgtcctattcagacccagcgactggaaaattgatcggaacttgccccgagctcgatacctccgatgttgagaaggcgattcaggccgcttccgaggccttccccaaattccgcacaacgctaggccgcgagcgcgcgcgcatgctgcgccgctggtacgatttgttggtcgcgaatgcggatgatcttgctaagctgattacatgggagaacggaaagcccctggcggacgcgaagggcgaggtcaactacgccgccagcttcttcgagtggttcagtgaggaggcaccccgcacatacggcgacacaatccccgcttccatccccggaaaccgggtcatgactgttaagcagcctgttggtgtgtgtggtttgattacgccatggaacttccccgcggcgatgattacccggaagattggccctgccctagcggcgggctgcacggtcgtggccaagtctccccaggagacgcccttcacagcgaacgcgatcgctgagcttgcgcaccgggctggcatccccaagggtgttgtcaactttgttacctcctcgaagaacaccccggcggtgggtgagctccttaccacccaccccgaggtgcgtaaagtgtcattcaccggctctaccaacgttggccgcatcctcgggaagcaggctgcgtctacaattaagaaggtctcctgggagctcggcggtaatgcgccattcatcgttttcgacgacgtcgatgacctcgacgctgccgtgaccggcgccatcaactccaagttccgcagctctggtcagacctgcgtgtgcgctaaccggatctatatccaagaaggtgtttatgaggagtttaccaagcgctttgtcgagaaggttaaggacttcaagctcggtggtggtttcgatgccggtatcacccacggacctgtcattcacgagcgcgccgccaacaaggcccatgaacatgtgctggatgctgtttccaaaggcgccaaggttgttattggtggtcagagggctaccgcgctcggacctaacttctaccaccccactgttctgaccggcatgaccaaggatatgcttctcgcttgcgaggagactttcggccccgtggctggtcttttccccttcaagaccgagaaggaggttgttgagctggctaaccatgccgaggtcggtcttgctggttacttcttcagtggtaatgttcgccgcatcttccgcgttgccgaagccctagaggttggcatggttggtgtcaacactggtttgattagtgacgttgcctctccgtaagttaaaatctcccacattgctatatcaggctctaacctttctacagattcggtggtgtcaagcagagtggcttcggccgtgagggcagcaagtatggtattgatgagttcatgactatcaagactataacttttggtggcatgagtctgcctctgcaggagtaaaaattggatacgaatgatttatttgcaaactatatattatgccttaagatgaataaaatctaccatggattcatatgaacattttgctcttctacacaatcatacttgctttacaaatattatatcctgcatatatacttcaaagattgcggtcgtgccattgagtcttccgtcatatagtgatcacctgaccgtgaacacaatgcggcagaaatatccactgcctcgccgccttctgtatcccttcccctacaacaagctaataattggcatctctatcatcagaaagaaaaagctttgacgggagcagttttttttttttttttctaaatgaggtcatggtttgatctactccaatgcgttcctcacttcgtttcctcgcggcggtctcacacacccggccctccaagctgaagaaaccttctatcagtctagaccatgtaagtaactcaagcttgggttgaagtatatgtactaattgaatcatacagtttatccagagacagcgggtgttgtcattctggcgggaaatcatgcgagcattaataagtgtgcccaccgttccagtttctagaagccatgtatgacactaacagacatgctcagaggtgccaccttcgtcaacacggactgagctacacagatatgcacgtgatgaattcgaacgccatcgaaatgtatcggatctggtaagttgatttcggatgttttctatggcaaggttcagatctgagaatacttgactgacctttcttcagcaacacataagatacttgctttcggtatgaaattttggtgttatactataatattatagattgctaatgagattaaagacaggcaaatcagagttcgagacgatgaggcggtatattgacgaacagatcgctggttgacctgtgttaggaatgtgtatattatggtgtcaaatcaactcaaggcatgtattgccgagctaccgagctaagagtgcataccgttgaagaacggttgatattagagggtcgacctctatagttgacaaggcagttctcggtcgaaaggagcttccctgttgcgttccaatagaacgggtgggatgtggtgggatgtggtggggagaacttccgagggtctctccacatcaagacattcacgtcgatataggagtctctaaacattgacggagattgtacggagccgggtctgatgaaggttacgtcttcaattctcgaatatagacattgtattctgctacattgtcctctccaaacaccccgagtgtatttcaacctcatgtggctgaggcctagactattggatggcaggcacaaccggaaacggctgccaggttacagctgtctagaagcttgctttcatattttcaatcctgcccagatccttaacatacagagtgtagtacgtcattgattttggtccaggctcttttatatatttgggagtccaaggttgcggcgtgttcatcgaatttctactacattgtgtagattcttgaaattacacccctcaattataatttacattctaaaggtattcactattaattcaagtcctttatcacctccaatacctccctaggagaccaaaaccatgaaatccgtctcatccgcctcatcctcccaatccgtcagccctcggcgggcaaagcacctggaacgaaaccgcgtcgccgccaacaaatgccgcgaaagaaagaagagggaacataagcaaatcgagcgtcggctcacccacgaaaccgaaaagaaagacatcctcatagcacagttgaattgcctacgagaagaactgtgggatttgaaaaacctcgttttccagcacgccgagtgccaagaccacgaaatcaaccaccagctcgccaggatgacccagaccgtcctgcaaacccattccaacccggatgtcggtccttccttgcccaccggctcatcgccgacattctcgactgggacgtggtccgatgagtcggtcgcagataacgccaaccctaccggaccgggcgcgtacaataacgattggacaatgttgcctgcaatcccgaccgaatttgcgccgtacgagccgaatggctttactgattccatgtttgagaactttatcgatacggacaatgggtttacttgaagaaataagcttccgttggttggctgttctctcttttctgcttagcgatggctgtatattaatctcagggctgcaaccccagaaaagcccgtaccaaaactcatattgggaacttttcatagttacgaaacaacgaatctacgaatcagtctatgacatggagacctatttccgcataaacattcctaaaaataggcctcatgttcctgcacaagcctaagccctggaattcccgaaactggtcgggtcacacggggtagatacgaagatccaccgtgcaatgcaatgcaaagcgaatgatcgcgaatcatcgcgaatgatcatgattcttctgtttcttgtctgcatgtgctggattatgtggggagatccacaaagcctctgatgtcactacccgagcacttgtgacggcatcgaacggttagtatacattggatttctatttattctgaagattcctttcgattcatataattcatactattcatatcatactttgttacatgtttctctcgctgatccctgtattatagccattatttacttctatattctcctcaatgatgcctacaggcttacctacgccaccttacggggagcgaatggcaaccttttcccagaaatcagtaatgggtacactatttgagacaactgaacggttagaaaaaaccaaagccgctgatatttgggcgagatcttgtatgctaagactatacgaaccagctacacagaatggaaacctcttggacttggggtatctgggcttgtctggtattatttcctggagcagttctatcaccagccagaactaacatttaattacatagctctgcaagagatcagcttgctcatcggactgtcgctgtgaagaaactctcggaacctttcaagacaccggctattgcaagacacatgtttcgagaaatgaaactactgcgacagttgcgacatgaaaacgtgagaattgccttgcgcagtatggaacggctgtctaattgcccgctagatcatcaacctgaccgatatctttatttctccctcagaagacatgtatgaagagacctctctccttacatgggaaagtactaattactctagatacattgtgaccgaactcatggcaacagaccttgatacaatattgaaggcgaaaagagtcgaagatcagtttgcccaatacttcatgtatcaaataatggttagtatcatctaccaacccccgcccagaacgcacgtgttcctaacaacaattccagcgtggcctgaaatatctccattcagccggtgtcatccacagagatctaaaaccaagcaacattctggtaaacgagaactgtgacctgaaaatatgtgacttcggcctggcccggatccaagagtcacacatgaccggctatgtctcgacgaggtactaccgtgctcccgagataatgctcacatggcgaaagtataacgaaaaagtcgacatctggagtgccgggtgcatcttcgcggaattacttctgggggagcctttgttccctggaaagaaccatatcaaccagttctgtgttatcaccgatctccttgggagcccccctgaagaagtcatcaacaatatcacaagtgaaaatgtgagcgaggtcatactctgaaattatattatacccaccgaaaggggttttctgattacttttccattttctgcagacgttgaactttatcaactcactcccaaagcgagcccgcactccaatatcacagctcattcccaaggcgaatgtaaatggtatgtttcaagctatcgctttccttgaaagcctcaattatacatctgaaccagaaagaaagaaagaaagcaaaaaatactaaccaaatcagcggcggaattaatcgatcaaatgcttcaattggaccctcaagtacgaatctccgcagcagaagccctctcatccccatatctcgcaccataccacgaccccaatgacgaaccagtcgctgcggaaacattcgactgggccttcctcgaagcagaactcccagccgatatctggaagaccatcatgtcagtagtcaatcctaaatgcagtacatgccaacatctctccggacattctgctgattatttctagctacggcgaggtgctgggattccatgcagaaatgaaccagactggccagagtgggccaatgaaatcgataaaccaggtggacgggatggatatcggttaaaatttaacgctagagtagattcatgatgaagatttccatttttgggtatgattgcttttaacggtgttgtaaactgagctgcaccgcccggataaggagagaaatggagtaaggacagattatcgtattaatattgggttgatacatgaccagaccatttctggtatatcaagatcatataaacaggggcagacatatgttcgtcaaatcaactaagtggggtatcgctttcatataggaaacccaaccgcgtgcgtatcatagcttgcaagatgtgcaagtgccgttagtacctaaacatatcctcaggggatacctagacagccccatcggcagtggcggtagtggtagtattgccgttggtattcgcatcagcagcactcatctccggggaagcatcatcacggtgattcttcgcgttgcggcgagagttcttaaggtctatgatggcgaaggtatttgtgacaacgaaagtagccctgctcagaaccacaggttagataatgtatgcatgcgtcaatccttaggcatctgttttaccattgcacggccccgacgacaatcaaagcctggagggcgtggcagctggaatagtggcatgcgccaggcgagggaatcattgcagccaaggcgatccagccgctgagccagaggccgccggtgagcagctctatgagaggaattgcgatttcatgcgagaagcgagggaagcgtaggggtgcgaggcccaggtatgggactgcgatggctgttgtccagcagccgttgaagagcatgtagtagactacattcgagtaggaccatttgtcgtacagagaggcaatttctagatggagtcagtgctgtcatggagtactttgtggatagtcaaacataccatatgcggtaagaccaatcgtggctagggacaggatggcctgcacgattcgcaatgggttgatccaggaaagcattttgaatgtggaaatggttctttttgttgagtatagcgtacaggtgggtagtcgatttgacaggggtatggaggaaaggattaggaaacgagaagatctacagtcgtaagggaatatcatgggcttttatactcgtgagagacggcctataaggcgactagcttgtgttccacacgtcatggtactgtgattcggaaaagaatgtgccttgggaaagtcttgaaagagttaggctgcatgaggggtggagtctcggggtaactgaaaagtttgacccagggtcattctgatagaccctggagctttccaaattagggtttggtgttggctcaacttccccgcattctaggtttctatcatgcgcaccatattagtcttcaggatggaaagcgttcatcttagactctttcatactctaagaattcaatactatttcaaaaccactcccttgacggcactcccgttccgaataagcactgattatgttaggttgccgcacgctagctttgtcgatctcacatgaaagcctcggccaaggaaacaaactcggccatgctgatccaaaatcaacgtgctgtttcgtaaattccagatgctgccaaaaaggtggtttaccatctgctagtggcgtgattgtttgggatcaattgagatatttcaacctcggtacgtcgatcatcatccccgtacacagtacgaccccagacgagccaatcgtacttctgtcactcatgcttatggattctagaacggcataattcatcagttgagaatccacatactatcggagaatttggatgcatatgtacaaaaataaaaaagaacctctcctatcttacaaagcgcacgccatcagttccgcgagataagagccctgacggcatccataaccccaatagacttctcatccgcaggctcgatcgatgaccgtgccgcttcagactcagaacgaggcgccggtttattcccggcctccttggccgcagcgtcaatagcagcgtgacgctccctccactcgcgatcctccttatcacgaatctctagctcgcgcaaccacgcatcacgcttttcttgcttcttccgaagttccactgcttggtcgaattcccggcgctgttgccgctccgtcttgaagtacattccgccggcgactacggcgactagtgtgaaggcttgtgcgtagatacgggctcggaacattcggttcatttcaaccgagtcaccgattttcatcgaccggtaggcgcggtagagggcataacatgttgcggcgcatcctgtggcagtatgtattagttttggttttcaatgttgggagggaaattccaaagtcaagatgagggcttgtgcagatggatttcgtaccaagtggaaccaggggttcttccttgagacgtcgtttgaatttttgaacgccggtctcttctgtaaattgactgtccgagaccgagtgttagcagacgagccttcccttcgcttcctctgcggcattgtcgggttccgcttgcggagcacgcggctaatgtgtgatacatacgggttctcctcgtcaaaagacgaaggaacaggttcccggttcatcgtgaagttgatcgtggtcgggtatgttgacggtcgtgcggagttcaattgcgtccacgggatgcggagttttcgtcacggggatattcagccgagttttataatgggtagttatgtagcaaagattagatcatcaagtcggggggcatgagggttgggaagtgtcgatgttggaataggctcaagatgctggagcgcaaagggtcgagctgtggtatgacgccaagttttcaaacatattgggttatgtaactatctggcccagccctggagccctggaggccatgtatttacaatgctacaacgacatcagggttcctgctttacatgtttctgtttgtaaatctcttatgtcggattggtctaaaataaaataacccaagcataagccattcctatactagtagcccctcattgttgaccgctatctacatctgcttgtcgtgcctgctacccaacgttgtctcctttcattcagtccaaggaacacactgtttcatatttgtctgaaagatttccattcgttttgatctcatctcctcttatatcaccctttcgacactcctaaatcaagctttatttcactaactagggctagttagcactcggggttgatgacataagggactccgatcaccggtcccgccttaagaaaaaagagtcaaagttcagaatttcccggctctcaaattctttctgatcagcattgggattgattgtcttcatcgtttggcagaaacgtttggcagaaatcagcctgaacttatcatgtccgacgaggctcccaacggcgccacgacgcccgtcactcccaagacgagcgggcttgcgctgactgagtataccgccgctccgacgccgccctctgaacgtgagcaaaggaccccaggattgcctcctaattggggaattcccgaagcttttctgcttcccaacggctacccagatgtaattcaagttctgcaataccccactgaatcttcaaattctaacactgccccgccattctagtatctccggttgattttgacgtcacgagtttacgatgttattgaagaaagccctcttacccatgctgtcaacctgagtagccggttggaaagccgggtgcttctcaagcgcgaggatctgcttccggtgttcagcttcaagctccgtggcgcatacaacaagatggctcatttgagtgatgagcagcgctggaagggcgttgttgcttgctctgctggtgagtttataactggtagataatgcaaaatggaaacgccttctgactcactcgacataggaaatcatgctcaaggtgtggccttttctgcccgcaagctgagaatccccgctaccatcgtcatgccctccggcacccctgccattaaacacctgaatgttgctcgcttgggaggaagtgtggttcttcacggaatggacttcgatgctgccaaagatgaggctcaccgattagagaagctgcatggtctaacgaacattccaccgttcgacgacccttatgtcattgctggccaaggtaccatcggcatggagcttctgcgccaagcaaacttggacaagctcgaggcagtcttctgtgctgttggaggaggtggtcttattgccggcatcggagtttacctcaagcgcatcgcaccccaggtgaaggtcatcggtgtcgaggcttacgatgccaacgctatggcccagtccctcgatgcgggtaaacgagtcttcctcaaggaggttgggctctttgcagatggtgcagcagtgaagtctgttggcgaggaaacttggcgtctcagccgggaggtcatcgacgaagtcatccaggtgtccaccgacgagacctgcgcggctatcaaggacgccttcgaggacacccggtccatcgttgagcctgccggtgctctcgctcttgccggtctcaagaagtatattgccaagaaccctagccctgaccccaaccgcgagcttattgccattacctccggtgctaatatggacttcgaccgtctgcggtttgttgctgagcgcgcagctctcggtgagaagaaggaggctcttcttagcgtgaagatccccgagaagcccggcgcgttcgccaagctcgttgaaactgtcctgccccacgccgttaccgcgttcaactaccggtacgcccgcgcagattcggctgatgtgctgatgggtatctcgctatctgcctctactggccgcgaagacttggccaagatcatgggagagctggaaaaggccggcatgagctgccgggatttgagtgatgacgaacttgccaagcgccatgtgcgcttcctcgttggcggccgctgcgaggctgccgatgagcgcatcttcatgttcgagtttcccgagcgtccaggtgctctcgccaagttcctcaccacccttcgtccggaacagaatatctctctgttccactatcgaaactacggcggtgatgtcggcaaggttctagctggaatccagtgcccgtcgcccgagaaggaggacttggaggccttccttcgggatttgggctatccgttcagtgagcacactgactcgcccacttacaagaccttcttgcgttccgaataaacattttgttctaaaattgcaaaagaagggaaggtgggtaacgagaaatgtattgttcatagcttgttatggtttcagcggtttaaggtccaggcctgttttgtctcttgtttggcgtttggttgattttgatagaccctttgtattataggtcacatagtctacttttagggttctcactacatactagcataagtacaaataccctcaaatcttctttttcttattatcgagcattaaaacagacttttctatcgagacactcaataaatccacatttcgcattgtcattctgttttacttgtagtataaaacggaccaatcacagcggccactcgcatcggctgaccggcgatacagaagctccggccaacatttgcgatcgcagcacaactaaagaaccttggaagccaaacatcaacctcgcaccgcaccccgatacctcttttgttcttcataaggaacatttgaggcgcagcctccacttgatcgtcttttgggaagataaaacagaatcaaaacccgccgccatgttttccctccgcgccgttttcggtgcctcctccggggccctccgccagttcttcccctctgtgaccacccggaccgcctcattacggcctttctcacacatgattcgcaacagcctgacaagactccgtggacaagcaaagtccggcaatgctgttgctgtggcgaatgggtctgctaaacaggtggagcaggttcgaggaatgaagactcggtcttctgttaagagactatgcgatggctgcaaggtatgatctaggatattgaacagcttcaatgctggaatgattgcgaagtcatgttgtctggtgctgactttgaatagcccgttcaccgcaaaggccgtgtctacattatctggtgagtggaccctgtgacattgaagcccggagttgttcggttttaatatgtttttttcttggtcttttagctcgaagaaccctaagcacaagcaacggcaggggaaatagagtcgtcactttccatcattttctccgatagcttgcatcgctttatccttccgcggcagcctttactcgaacagtctgagatattggcgatacttctaggcataaaaacatgctctcaataaccaggttgtcttcagctgccttggatacacgacttgccgtggcggaactcgtacggcggcatatttttgcattcttgttacaaaaccagacagtggtaccacggcgcttgtgtattttccttgtatattagtgtgacaatcaagtttatttggtcttcatgtttcgatccaattcatcctaatctccagtctttctcagatgcccaatatctatggatatatgcgcaccttactccaaccaacggcttgtcgccctactcaaacctccacgaccaagatatggccgttttcaatatcgatatctcattttatggctagctatacaccgaattgtaatctaccggctctgatgggccgatgtaaatagtcacgtgatgcgttcctggcttccccgaacttttttttcggagccaactaaacatccaattcgcgttgatcatctcaattttggagtggttggatcatcaccatgcggtctccttatcttgcacggttacaaacccgtgcggtgtttggtctaaccagatcagctcgtttccaaccccagactcttctgcgccagcgatgcgcttcaacgcccgcgttccggtccgccgctgttgcgccggcttatcagtcgaagctgggacaatgggaccagcgccgaaattcctctgctgttgcttctgcggtgtaagtatgcttgtcgacccgatctgtttcttttgctctttttaatgttgttattagtctcgaggctgctaaggccgacccggagggtctgtcccaagccgccattatcgacaatctcgatccgctggagtccgctcgtcttagcaagtgtcgtaacattggtattgcggtatatactatcccacttgctccatgtacgctttttgttcttgtctaatgaagtctcgctgcctaggcccatatcgacagcggtaaaaccacctgcacagagcgagttcttttctacactggtcgtatcaaggctatccacgaggtccgcgggcgtgacagcgtcggtgccaagatggactccatggacttggaacgtgagaagggtattaccatccagtccgcggccaccttctgtgactgggttaagaaggataaggagggtgttgaccagaagtatcacctcaacttgattgatactcccggtcacattgatttcaccatcgaggtcgagagagcgctgcgcgttctggacggcgctgtcatgattctgtgtgctgtctcgggtgtccaatcccaaacgattaccgtcgatcgccaaatgcgtcgttacaacgttcctcgtatctcatttgtgaacaagatggaccgtatgggtgctaatcccttcaaggccgttgaccagatcaacactaagctgaagatccctgctgctgctgttcaggtccccatcggtgccgaggacgagttcgagggtgtcgttgatttgatccgcatgaaggctctatacaatgttggcgagagcggagaggagatactggagaaggatgaaattcctgagaaggtcaaagcccttgccgaggagcgccgtaccatgctcatcgagactcttgccgatgtcgacgatgagattgcagagatgttcttggaagaaatcacacccagcgaggatcagatccgagctgctatccgccgagctactattggcttgaagttcacccctgtcttcatgggatctgcgctggccaacaagtcagttcagcccatgctcgacggtgttattgatttcctccccaaccctgctgaggtggagaatctcgctcttgaccagaagcgtgacgaggcgtctgtgaagcttgtcccttataactctcttccctttgttggtctagccttcaaattggaagagagcaacttcggtcaattgacctacatccgcgtctaccagggtactctccgcaagggctccaatgtcttcaacgctcgcaacaacaagaaggtcaaggttcctcgtattgtccgcatgcactccaacgacatggaggaagtcagcgagattggcgctggtgagatctgtgccgtcttcggtattgagtgtgcatctggcgacaccttcactgatggaactctcggctacagcatgacatccatgttcgttcccgagcccgtcatctcgctctcaatcaagcccaagcagagcaaggacggtgccaacttctccaaagccatggcccgcttccagagagaggacccaaccttccgagtttcctatgataacgagagcgaccagaccattatttccggaatgggtgaactccaccttgacatctacgttgagcgtatgcgccgtgagtaccgggtcgattgcgaaactggccagccccaggtcgcctaccgtgagaccatcggcaaccgtgttgagttcgatcacctgctcaagaagcagtccggtggacctggtgaattcgcccgtgttatgggatggatggagcctaccggcgtcctcgaggacaacaagttcgagcagcaggttattggaggcagcatttcggagaagttcctgtacgcttgcgagaagggtttcaacctctcttgtgagaagggtcctctgattggccacaaggttctcggaactcgcatggtcatcaatgacggtgccactcacatgacagattcctccgaaatgtctttcaagaatgccacccagcaggcattccgcaaagctttcgcagaaagccagccttctgtcttggagcctctcatgaagacggtcgtaaccgctccgactgagttccaaggtgatgtcatcggcctgttgaacaagcgcggtgccactatcaacgacaccgaaaccggtgttgacgagttcactgtctacgctgactgcagtctgaacggcatgttcggcttcagtagtaacctgcgcgccgctactcagggcaagggtgaatacaccatggagttcagccactacgagaaggctcctcctcacatgcagtatgtttcaaccccaatcacttctctaaatatattatccgttgctaactgtcttctcttacaggaaggaactcattgctaagtacctgaaggcccaggccgacagacacaagaagtaaacgataaaatatgtaataactcctcacccactccaactactctggcaagccaagctatgcaatgcctagcattggctcttgttggagccaagaagcagcatattttgctttcaatccctgctgcttcttccatccaaaaccccctgtactatttacgcatggcactatatcacattgtgactttctgggacctgtatttcaagatcatgatactactttctactctcctatccgaacaaatagaatttgtgttattttatctctccctcttcggattatttacttataactaggtacttgtgtctttgaacaaggacacccaacgaagtatggaactcttgtccttggttgtttgttgccgaactcaaaagcccctggcctgaggacctcgtactgcttatcatcaatagtagctggggtaatttgcttcagatgctgagccgactcaaagaggtgatggatcttaggcccataagaaaagacccatcacgtgacacatagggatctttccctctcgacacaatccaatcccatcttctgaatcgtgtatcccactctcgtacgcgtcttacggttctattctcaagcttcccaagcacaatcagaatacaggtcctgaattgccgaatcggatcaggccgaccgtggggtctggttttaccgtgctctcggcaattgtgggtcctagactcataccccacggcatgtcagcgaaacgccccagactcgcgtccccggtacggtataatcgcctgccgatcccagaaaccgacatcgatacctcctttccccgttatcagacactatctcccaggcttgtactaagtaagatgaatctcgctttcctatcatgctgtatttagacttgagttgctaacgcgcaacaggaacggattcgcaagtatggggactccccgagtcagcagaaatacgcgctattcacactcttgagactacgccagagaatgaacagctggttcggactcatcatccggcattgcgactacgtgatctagtttacgtatcgcatccccagtacggccctgaggtctggcttgtgaacggcgcgtgcgaagacattgaagcgggggggcgaccgttgcacccttatcctgaggatagacggaacctttacccgtctggaattttgactccacgttcaccatggaaggaggattacctttttaaggaaggtatcaacccaagaaagtttctgtcccctgagaagattgatggcttgcgcgagcttttccccacggcagtaggggcccgtgttttcgtcagtggattcctggtagtccttttcaaatcactccacgacattcaagccatatatgaggaaaactggattatggaagctggtggtttgcgaatactctatgatgaatataggcttgaagctaccgccgataccgttacatccggcatggaagtttgcgacaaacctgagagtctccagggtcaaggctgcttaggcctgagaattcggatgaacgatggaaaagaagctatcacaactgtaacgcatggctttgtgaggaaccctcgacgctcccgtatgacgaagatgttttccgagtggatcctaagagccaagagggctcttctatgcctccggaatccaccacctcaatctgatacttctgctattggagtcgtacggaactccaataaaaattctccgattgggaaagaggtttggttagcaacggagaaaaagagggtaagtctcctccctttttcccgtgcttactgctaataactccaacttattcatatagatcggtaccatctcctacacattcgacgatccaagcccagttcttccgtttccctctggctatcggcacgaccttagcctcattatggacgatgagttacctcagcttatcagcccgcctggttatcccgctgtgtcggaatgggcgtcatactctactgtactcgttgggtccgatgtctacgttgtccgaatgaatacagtcgttgggaggtgggctcttctcgaaggaaccgttggcccgaatgcaattagaaacgcaacggttataggtacccagtacctatgggaccgcactgcgcattcacagactgcatcgcttctatggaaaacgaaggaaccgtttagccctgccgatggatggtcgggatccgttctctgtcttggacggccgacggatgagttgagccaagccgttgtatttcagaatttcgaagtgctctgtaccacgttcgtcgaactcgaacccggtagaactcaagacgtacttgttaaagggggattcttactccctgaatcgatacggtcttctcaaattgtcatcggcaatgacgagcaccggggcaggaattccgatatatatccgcgccgcaggacagaacgcgcagttctagaccgtcgggtattttcggctctctagcaagatttgttctggctttggttcacttgacaattctccggaaattcttactctttactatgttatttttagactgcctcagtgatcacacatttcttacctttgtgaggctttgctctggctttggttcgcttgacgattcccaagaaattcttactctttactgtcatttttagacagtctcagtgataatacatttattacccattgtgaggccttcaaataaactagaatcctagaggagacgttagacggtcaacatacagaatgaaaaaggaagttataggatgttgttggattaggagataaggaagtctattgcagtctgtatgatctccatgcttgctagctgacctccctagatggttggggttattatatcgctctcgtcttctacagcacgaaggaaagtcccacaaacgaattcacccatgaatgatatagaaacttgaatttcttagggtcgggaaattggacattatgattttcgtatgttaggtaccatttctattagtataccatacaaaaggcacctgatttgcgatttattgttgactggggctcactaacacacggtatgtgttttgggcgcctggcacgattattctcttccgctaacgactctatagtatgccttgctacgctcagcaaaatagactcggaactcgtcgactcaaacgtctctagttattcaagcaccacgctctcgggccttgcgcaagtcttcgactccggctttcttctttagttgaggaggggacgggggaatattatagtgccaaggacttcgaataaaaacatgaacagtgtctgagggacgaggagggtgctggttgtcgtcgacgttaacggggggcttcgggcgagctctgctggacgaaagtagacccgtcgtatcctttgtctgttcaatgttagcatgttggcttggtacatagtctgcccatctcactttaatcttcttttctgccttgaaagtcgacacacgtacaaatgagggatttgggcttgaggggcatgaaaggggcgggagggggnnnnnnnnnnnnnnnnnnnnnnnnnnnnnnnnnnnnnnnnnnnnnnnnnnnnnnnnnnnnnnnnnnnnnnnnnnnnnnnnnnnnnnnnnnnnnnnnnnnnnnnnnnnnnnnnnnnnnnnnnnnnnnnnnnnnnnnnnnnnnnnnnnnnnnnnnnnnnnnnnnnnnnnnnnnnnnnnnnnnnnnnnnnnnnnnnnnnnnnnnnnnnnnnnnnnngggagggggagggggaggggggatttatgagcggaaagagccttgtccgtgggtaggattgagagaggcttcttcatggaaacgggaggtaagggcttatcctgtgatgtgtcagtctgcttcgatatatgttcaatctgatcggacccaggctcagataggggaatgtcctcggagtaatcattcttgtggaaattgaagctccgaaacgcctggatgatgggaatatcttccttactcacaccggtgaacaagggaggcaaatattcctctgcatgctggtcgtcgtctcctaacttgtccatgaggtcttcaacctcggggtcgctaagcgcacctatgaagaagggccatctcggatcagcaggcggtgatgtagggatacgaggaagtcccttcgtggcagcaggtcttcctgcagcaccatttccctgaccaactgatggtttcgggtgagcgtcttcggcatagatggtcacattatcccagagcggatcgccttcttcatctcggatttgatagaatgccaacaaacgacgagcaatgtgcagctgggtttccccatctctcaccatcatggtcagtcgataatccagatgaaagtcttgttcgtacaagacagtcacgaggaatgcaccgatcgcgtcacctgggaccttgtccagaatccaggtcctcaagcattttctcaagtaatggattgccttaaggtcccaggaaatgagaaggcgtcgttcttgaacagcaaggacagtatcggccggtctgtcctccaagaatgtctggaagagggcttctagttgccaccggctgctgctagcttccttgtaggagcggcttagactggggttggctggactagatgattcagtggggatcttgttacctgttggagacatttgtggtgtataggatgagtgatatattgtgaggtttgtttctgctgaaaataaatgtcatacagtcaaaatatatgagaaaagtatgaacccaacggacatctccaagtatttatgccttttgggtcctttttatttagtgaaggttcccattgttaagcacagacaagagaaagagaaaacaaagaggtatgcttgtacatcttcaagtgttttgatcaaagaagatattgttctggagtatccagcaagagtaacaaagtcgaacaaagacaagcaaagagctttggtctagaaagttactcattgtcaaccctggttgcttgcagagggattctcatattacgcccatgtcaccttctgggggctgaaagacagccagtggacaaggctcaccatcaaaagaggcgaatgagtattgttcaaattcagatgtattggaacagagatagcacaactgaattatgtacagaaggtgaagacaaaatatcatgggaatcatttgaaacagacgcaacgctccattaaatcatatatgatggattagaaaagaagacagcagccataaacgagctcactggaagggtatatgcacgccaataggggcgatagagttaaaaacagtaatgtaaaaagaaaagtccccaaacgggtagtgggcacggaatcagaacgaagaaggaatatgcagcctgcgatcaaagccacaagacccatcgaataccagtaaagacgccccggaagacaccacgtacaaacttgaaacccatgacaatcagccacacccaccaaagcacagcaacaagagcccattccaaaaccatgaatccagtgcggcggatccaccgcaaccgacggcgacgcttacgaaggcctttatcaagggcatcactcagttgcttgacagcgagtgtgctggtggtgttgagctgaacacataggtcttcggcatcatttgccgtggttcggacgcgaggagtcagggaattgttgactaggtcttccaggttcttcagctggtaccgcaggggatacgaggtggaggtggagaaatgatgcatggactgttggaacgagtgctgggtgtgctcgaaacgctggaggagacattgagcagcgaggtcgaactcgccaattcgcgtcactcgtggaacagatgtgccgggacccaccgagctttgaagccagtgaggaactggctcacggaaggtatgggctcggcgagtgatctcccgggctttgatccccgatgacaatagaagagcccgcgtgcgctcgacttctggtttaccaggtacaccggtgtcaatcaaggtacggatactgcgcccagatatactccaggcgcgactagcacctgaaagtccggggcgtcttccttccggagaaagccctggtgatgctcgagcgttggcaagcccagtgacaggtggccgtgctaagctgaaaggaatggaagagtctttgatctcgtggcgctttgtccgtcccgtgtgtagagaagggctgaaatcaagcgttttgctacgtggcagcgcgaacttcttgggagaatcacgggaaccataattttgtggagaaggaactcgctcgttaggactgccaaaatcggtcgtatctgctgtttcactccgttcatcttgccgcagcggtgatgtgaaggtcggtagggagggtataaagcttcgggatgaattcttctcagaatttccacgggtcaatcgcccaggctcatctgtaaatgttggcaggcgccgtaagagacctttggagccatacttcctgtcactcctagactcttcatcagaaccgctatcatctgatggaaatgtggtggcggatgatgatttccgagattcaggatcttctttcttcaagatgagatctccgaccttggagacttcattgcccacgatctttgttatccgacctggtcccttaaatattcctcgcagctttgattcggggagatggggccctttacgggaccgatggccatctccccgattgccttcctgcgtgccttgatcgtcatgataggatgatgacacaacgtcaggaagaggactcggctcgagcttagaggcaccctccgtcagtgccgtcagatttcgctgacgcaaagtctcgggttccggcaattcatcttcccgctctcgctctcgatctgcttgtttgctcttgctacgctcgtggcgtgaagcaatcttgtggcggagacccttctttgcgggcgagggagatcgacttgaggggggtgacagattgactgctatgctcgggaagtagccaatgcgagcgggagagttgggcgcagtactatccatgccctctagggacacacgaagatcgtgccggtcatcaagactacccgccgatgagaaagagtctttcatgcgcttgcgggcttgcttcttgttgaccgacaatggctcagttggctgtggtgtccttccccgatcaatgtcagcgttacgaacatcggggaatttggcgcgcgatgtccgagatgctgattgtgcgttttcgacgaatctttgaacgtgatcgcggatatgttcacgagacatgcgaggcttctcatcgacggaagggcgggtatctgagcttgaagagctcgagacgctgcccgaacgcattttgccatggtcccatcgtgacggctttcgtttgctcgaagcactacggctgcgtaagctgtgcgaatgacttcgaaatctgtgcctgtgccgcccacgacccacgctcttgaactcttgcgccaatgcagggtgagaactggagagagaagtgcgcggtgacgaatgtccctctccaggatctcgcacttcgaccgaaaggcgcttctgcttagaaggcgtcccgatgtcatcgcctgtgtccatgataactaattctttggggttagggtatagtctacagccatccttgtcgaccaccttcgtcttgttggcaccatattccagccatgcggcatcggccagaagctctgccggtgagatcttccaatcaattcgtggtcgacgggccttcgtgctgctggttcggctgactcgccgcaagctcgaccccggagaggtaggcatcatatccataccttcatgttccccgatagacacatggcggcgatcttgttggaaaggtggcagctttaagcaatctattgggtcatactctctatgactgtatttttgctcgacgttattgatccattgatggactctttcgacgtcgtgccatccttcggcatctgcgtcgatggagcatttctcgcgatacctaacttttcggttgcgaatcatttgaagcgggttataaccacggttggatctatgtggtttagactcagcatcagccgtgactgcatctcgaagaggtggtaatgagggcagtagccgcatatattcatgaaatagatcaaaatgattccgtgctctctcagcacgagccaaagtgctttcggagaattcatatgctctctgatcctcaatcgcggatggaggcaacaaattcacaacagatgattggtctaagctcggcagtgtcccatgtgacagacgcctaccagagacctgggtaaaattgcgatacggcgattcacgctgaaactccctcgctcgtggagaatacgcatagccgttcactgttggaacagtgggttgggagacagatattggtcttcggctctcagggccaaggggtattccagaggctgtcctcctccgagattcattaagattcaaggctagattcacaatctggatcgagtccctatcaaggccaggagttgaatgtgtcacattgtcttcccgtagctcaggctgcgaggggtttccggagggctgtctatcaggagtcgtagaaggttgccaagcactattcgggtttgaacttgagtcatctgggattgatatagatgcatgatgcttatgccggatccatggaaatttcgagcgtttcttgggtaccacaatatccggttctggaacgctgcgcttctcttgagggggttccgaggggcgagggcgatgcaggctaactcttgtgcttcgcggacgaggtaacgagtcaagcaggaaaccccctgagctctgcgttctccgctggctcggtgtcctccgatttccatcacgggaactgctgcccagtgtactaccctccaactccacgctcgcttggccgtcgttctttccggacgaagtctggcgaaatgaacctccatcggatcggagaaaaggcgacgctgtttccgaggatcggtctcgtggtcgtccattcaccggagacattgaagatcgtacagggggctcgttcggttgttgcgacattgctgcaggaagggcaacaatgctagatggcaacgttcgaggaagagacagacattattcggtcagacacaagcatatgtgcaaccagccaaattggcaagggttcaaataccagtgaaattgaagtcaatgttgcacaatcagttgcactatcaggctgcaagttgtagatcggaatgcgcgtcaggccatgttacgtaatcactttattcgcacccgtgggcccgcctaggcacgaaaccgcggaagactcgagtatcagtctgatactatcagacttgttcgtttgatttatgatgagaagatttgtccagatttagagtacatactacaaactgcacaccttatataagtcaagagacataggaaagttctagcatctgggtctaaagcacaagtacaactagaggtacagttcctgtaaaacgaggatatacagggtaaaatgaattcagcttcgctcaaagtatgcgcttactcaacccgcaagcactggaggcgggcctcggcctcgataacctgggagaagaaaagtagttagtggatctgttgcaaattgccaaatcgaaaggtggaacaaaagcttacttcgagagcctgtctaacttcaagaaccttgcgaacatcacccagccagtccttgctgagaattttagcccagccctggagggtgttcatttcccgagcggcggcgtcaacatcgccctgctgcaacaggttctcagtgcgcaccagaacgctctcgacgtcatcaccctcggacaaagcatccttcttgaacatgaccttgcttaggacaaggctggcagcgtgactggcaacaccggcatcctcgggaagcaggctagccttgcggacttcacttgcaacgcggcggaaacgctcgaatatctgagtggtggaggggataccacgctggtaagcagtagggttaatagatgcaatggcagcctcgacgacggcatcaccagcagcaagctctttcacggccacaagctcacgaacgaacggccggggggtctcagcacgctcgaccacggtccgaacggcgtccagtgcgacctgcagctgctgagtcttgagattggtgtcgatcacgtcgctccatccagcggtcagcttctcgagctcgttaatgtcggctgtgagctcagtcaatttgctcagacggccctcacgctcgcgttcgaccaggctctggacctcgtggacatacttgcggttcagctcgatagcttgctcaacgagctcattttgaagacgctgctcagcaagctcctgagcgtggcggagctcagttttaaccttatgctggtatgcctgggcgagcttctcgcgctcggcctcgaactcttcacggaatgaagcgaaatcagtggagcgcacttcctcaaattggcgcattaattcacgtgccgagtcatcaaaggtagcatgaagcttgttaagctcctcctgggcggtgttgcgagcctcgctgcggataccagcgatcttctcggcaatcttctccagctcgcccttcgccttggcgacaggagcagagtacttgccggagttttcatcggcgctgatgacagtaacgatgtcgttgaaggtcttaaccagatgctggacaacagcgtcatcaccatcctgcaacttgaccagttcaatagtgctcgcagaaacagcaggttgtctgggctgatccagcgagacggggttcttcgcctccgaatcaggcttcgtgtccttggagctaggcttcgaggcgtcttccttggccttcttgactacggcggtccgatcctcgggcttggcagtcgacttggtttggccgtcgtgagtttccgctgccttcttagaatcgacttcggccttcacttcttcagcaatcttccaagacagaccgctcttgccggggattgtgatgggcttttcctcttctcggggtacggccgggagacggttttggtgtctcaaggcattggggaagcggcggtagaagtcgcgctcctcaaagtagaggacgcattcttcaccgtagggaatgtactcggtaaagaaatcgtggaagttgtcggatttcagggccaggaagatgctgccaccataggcaaagccggatgtgaggatcagataaatcaagaaccgacggaaacgaccggatttgcggggagcagctgccggaggcgagggaggaagcttagattctacagaaatatcgcattaggacataaggggtgggcctcaatggtaattgatgaatgaacgggtcgtcataccttgttcagcggcctgcgagatggtcttgggggggatactggattcagaggaaggggaaaccggtgtcggaccaccggtggaagggggcttagaatcggcgaagaatcgctgcgcatgatgactgtcagtatgaagagataggacggctggggagttctctttacctggcctacaagccggttgcttgcaccggctctagacagccattgcgacgggatccgttggcggacagggtttgacagcaattgccgacccggagcaatcgaggagcgcagcatgacgagccgcacaatcgccaaaattagtggctaaaggtgatcagaaagatggatgggtaggaaaacgggaacttggttgctcagttgcgatccgccccgataatcctgcgggcggtcagggtggctttgcgcgccatttcatgcccacttccgtacatactgacatcacaaaaaatttagctggcttcggagtgcaataaaagataaaacagagattggcctattaatatgggaacctcttttccccggatattggccactggttagatgttcgggaggtcaggtgtaaacaaagaagaaatatattgacacgaacaacacaagtaacaaaaatgaatatcagttgactatacggagtcgacagaactcataaagctatctagtctgcctacactactagtatattgtgtatcttcacagcacatacaggtgaggaaaatgtattatttgagcataacatactaagaattctgaaagaggcaagggtaacgggaatagcaggaattcagcccaagacataggacgaaagaaagaagagcagatgcagacgccaggtgacaaggaacaaggagtacagaaggagcagcacggtcaaagcaccgacagatccagctgcagcatgtctaaagccaaattccatgtggcttcatggaagttaaatccttctgccaaccggggtcatgtgagcccccaattgaagaggctgagcaaggacaaaagaagcaaagaaaaatccgagagagttagattgatcatgaaccgagagtctatccctcggctccgtagcggtagggaatggtgccagagtccgatggaatgacattggcgaaatcatagaaagtcacagagttataccaccgttgaaagatgctgggatgtgtagccttaggccttctcaaacggtgggtgaggcgagggcgcactacccagggggaaatatgatcgagtaactgtttaacaattgcacgcaccagcaccctgagttccgggggcctctggtcgcaagtcaacgccgggccgaggggtcgctcgcaagttccgaggaccggcctgatccagaggtagtttcttggcgatggcggtgaatagttccttgacatttatcgaggacttagcagaggtctcgaagaaaagcaggcccgcttcacgtgcgtaggcctcggcatcagcctcttgaattgctcgcttatcagggctttctgtgacaagatcgagcttgttgcctgctagggcgatcacaatgttctcattcgcttggcgctgaagttccttcacccatgatttggctttgtctagcgacgactatagggtagtttcacgaatgttagcttctatattgcaataaagtcaaaggcgtgatgcaggattgaaccatacagcttgggtgatgtcatagacaaccacagcacagttggcattgcgatagtacatcggagccaacgacttataccgctcctggccagcggtatcccagatttcgaacttgactgtggtgctatcatcgagggagatggtctgtgtcagaaaggcggctccgatcgtcgactcgcgataatcatcgaattggtcctgaaccgaaagattagcattttattactccatgtgcgttcggctcgccgcgggaagtaatgtaatgtggggatcgttgacgactcactttaacgaatctgaggacgagcgaactctggaagatagcggtcaagtcagcggctgataaagaagatcgcaagtgttatcccaaacctttccgacggcggactctcctataaagcatgtcagccatggatcgaaagatgaaaaagaagtacaacatcatcagaacataccaagaaggacgagcttgaactgggcaaatcttgcgcccgggcgggctcctgctgcttgtcgggaagccatgatcaggagagaggagggagcgtctggagggagcgtcgaaggaggaaggaagatgaactgtcgaggaactgagatatatgattcaaggtctcaagacccggatagaagatcgagaaaaatgggagatccaagggtatggagtacaaagatttaaacacttcaaagacctcgtagtttaaggcagacaggaatagatgacggaaggcccagccacaggtgcagcggggcggtgtggctgcgtactgaccagagtggcccgctgttacttttgtaccttccgtcctttttgggaagtcgtagggagacttgaatttattttccctttgatgcttgttcctcttcaaattctcttgtaagacctcatttcaggaggtcactgtttccaactatgtctcctcctattctcccgtttcgggatatcaacctacacgcgtcgccctcccactatgcctttacttcgccatcatcacgccaagcaccaactctggtagtcgaccgaccaaccggtgatttacgtttgaacgatggcccccttccaggtgctaagcgcatctcaagtattgctggaattctcggaattctcaaattgaagcttggtaattgcacttacaaacagaaactcaggaggttgcgctaacgctcacagataaatacatcattgttattaccaaagcccagcccatgggacggttgcgcggccatatggtatacaaagttgctgggaccgaattcctccccatgcgagaacggccgcttcacgacaccgacgaagatgcctatcttacattggtgaaagacttgcttcgaaggggacccatgtacttctcctactcgctagatgtcaccaatagttttcagcgacagtcacaacatgccccagatgttccgatgtggaagggcgcagacgaccgcttcttctggaatcgcttcattcaatccgatctgatcgatttcagcctcggggcaaacgacacaagtggaattcgctacggcccccaaccaggggcagacccttacatcttaccggtaatgttcggtatgatgcgcattactccggcccgagtaaagtcgacatccttcaccttcgcgcttatcacccggcgatgcagacaccgagccggaacgagatacttctctcgcggaattgacgagcaggggaatgttgcaaactacaacgagactgaacagattgtgatcttgaatgactcgacgggtggactatctgggtttggtggaggtcaatcaatgaccagtggcaaagctgggcaagacctccaagtctactcttttgtacaaaccagaggcagtgttcccctgttttggactgaagttaacgacctcaaatatacaccgaagcttcaggttcgtgacgtcgagacttctatcgaagctgcgcgaaagcatttctccgaacagatccgcatatatggagaaaactacatggtcaacctcgtcaaccaaaagggcagggaagagaaggtcaagcgcgcatatgagcagctggttcgcacattagtcacttcctcatctgagagcaccgaggctgatgaacgcacccctgaaaagatgcatgttttggaaccagggttcaagcagaaagagatggatcatttgcattatgtgtactttgatttccacaacgagactaagggcctcaagtggcatcgcgccgagttgctcatgagccgtctgaacgacgggctgacccagggcggttatttccgtggagtggagagtcctggtgcccctggtgggcagttagatactcgttctacgcaaacgagtgtagtccgaacaaactgtatggattgtctggaccgcaccaatgtagtgcaaagcatgctcggccgctgggcagtgacacggcagcttatggatgcgggcgttctccgccctggagagactgccaacgatgaccaggagtttgaagacctgttccggaatatctgggcagacaacgcagatgtggtttccaagacttattccggtactggtgccctgaagaccgacttcactcggactggcaaacgtacgcgagccggcatgttacaagatttgaacaattccatcacacgatatgtacgcaacaatttcctggacggccctagacaagatgggtttgatgtatttttgggtacctatctcccatcggactcaacatttgccaacatccagctattccttgaccagcgaccacttgtcatccagtcagttccatatgttctcgctgctagtgtgttcatggtttcggtagcgcttttcacaagacgattgcctgatgccgctgtctggccgcttcgcctgtttatgaccttctggttgctggtggcggtttactgtttccgcttcgtgcatggacacggcatgctctatgtaagttcttcttatccaggttgaagtattgacccactgacaaattcttttttttaggtcaattggcccaagctaaacacgccgatcgctggcgctgagggatatcaggatgctctcatcaaagcacgctccgatcccatcatcggcaattggcttccttccagacgacaccagcgtggcattagcaatgcccgtctcgtctttttggaagagggcaagactaggattgagtaaatgtttcattcattccggcgttcttgggttatttctttttaccctttattctcatattctgtacacttcatggctgtgtcttctattaccattctgtttaccactacaggcctgccggcagtttcctttctgttcttgccccttcaattcaattcaattctaatcatctttcatctttgttcgatacgctgtttcttgcttgcaataacctgattttccagctctatgctgctaccgtgatttccgaatcggtcccattgttcccgctgctcggattctctcgaaaggttttcgaagagcttagccaatacatgaacactttcaaatacccatatacatcttcaaatttccttatctattgaatgtgagttgttgctcattcttaaacattacaatagatgggaatattgagaataatgagaatagctagaaaggaagttcatcaacgagagggcttttgatttttttgtcttttccaagttcaatcttctacgactagatttctaaaatatatcatgttgggactcaaaaacgtgttcctagatatcaaatatactttcacttattcttgcttataactcatacaaagtgctggaaacatccaatatgcggccttatactatacaaatttatctgtgaatgtagtttataaaataacaaacgaccatgtaactagtcagttagttagttatagtcacttagcttgagttcagtcctatgtatgcgatatgttaggaagcacgtgatcttcccggtcagtatgaaaagggtttcccgaggagagcggggatcaaccagtgaatcataaattgttagagctaccggggtttctttaaccacccctgctcatttgaggactttaggcacgggtttaatttgttcatgcgagggctttgcacctctattcgctcgcaattttgcacaaggcgattttcgacttgttcgcccaccatgactcgaacatatgaggtatgccactccgggctttgcgacaaggaataattatgtcaaagtatagcatatactgattttggaatacataggctgcgattgcatccctcaactcattgcagactaactatgcgattgtggcggcgttcaagaaatctacaacgaggcaacagatcaacgagcaatccctcccggagacagtggagtggttgcggcgcattggatacaaggtgcgctgatggcagggatcttgttccctcattattggagctaatgcgagatatttacgttctctagccttccgatctcaatcggctgaacgcaattcatgtcgccggcacgaaaggcaagggctcgacctccgcattcatctctaccattctctctcaatatagccgaaaagatgcggatcaacctggatccaatcttaagatcggtctctatacctccccacaccttcggttcgcacgtgagcgcataaagatcaacaatgccccattgtccgaagaacagtttgcgcgctatttcttcgaagtgtgggatcgccttgagcactctgctaaattgctgggccaggatcccaccgggcctgggacgaaaccacaatatttccgatacttgaccgtgatggcattccatacctacttgagcgagggcgtggacgccgcggtgatcgaatgtggaatcggtggtcaatatgactgtaccaacgtgatcccacagccgaaggtgacagcgattagcagtcttggaattgatcacgttgatttgcttggacatacgattgaggaaatcgcgtggcacaaggctggcattttcaagcgaggcgtaaatggattcgcggcaccacaacctctggctgcggaacaagttttggctaaacgcgccgaggaggctggtgctcaactggaaatcgtggcttgtcatccagagcttcgtcccgaaagtagcaagatcacccttgggttggctggagacttccagtataccaatgcctcagtggcagtggcagttgccgcggacttcttgcgccaggttgacattgatgttccggacaatatcaagacagaaccactaccggcaaagttcaagaccgggctcgaggaaactcgcctaggtggcaggtgtgaaacccgatttgagaagaatgtctcctggtatatcgatggcggacacactctggagagcatccggctggctggccagtggtttgcgtcgcgtatccaggccgactcatcgtccgaggacgtagccgccagaaagacacggattttgattttcaaccaacagactcgtaacagcacagctcttgctcgtgctctccacgagacccttgcgttcgcccttggaaatgatagcccattctctcatgccctattctgcacgaacattacctacaaacaggcgggcttccgacccgacttggttagtatgaacactaatgctgatgacctcgaactccttcgagtccaaaaatcacttgccgtggagtggaatgctattgaccctcatgcgcaaacacatgtttttggtacaattgaggaggctgttgattttgcgcgggaagttgcgggccaggaacgcaaggtcctgcagaaggatgaagctccggtcatgacttttgtcaccggtagcatccatttagtcggaggattccttgatgtggtcgagacaaaaccacccaccgacgcatgattcccagacgattggtagcctggagctccagagattcttgcattcattgtatcaaccacatgagatatgcttttggcttagtataggacggacatagatgtgtttctacttggatttcaacaattcctcgattttaagcatagtttcatttacaatcgtttaaatgataccatattcgaaagttgtacgtgcttgggatctacatggactttgcatatgtggatgccgaggttcctgatgtaggccattaaacgtttattcgctgagcaggggtcttcactgctcacagtggagcactagtactccctacagaggtgcaacgtatccataaataataattaacaattatttccactactataaataatagcgtgagtgaagcaagttatgtagagttcgtcttaaacttgatcacagtattattaagtcagattgcccgcacgacccccaccagagatccgcggcgtttgaaacgtggggcccaacccaattccttcttccacaacaccccagcgcatcatgtccgactccagcgataagaagggcaaggctcccaagcgcaatgacaatgagtctggcgctccatcagactcaggtaatggtagggctccttccagcctcccacactagaccctagcgcagctgttgacattcaaattctagaagcagggaagaagctccctgcgaagttcgcttccctactcctcgaacaaaacccggccttgaagagcgagctagctgcgatggacaaggaccaagctgcggccctactgcacaacatggacctctcgcagatgctgactggattggcggtgggaggtaagaaccagaaggatatggcctcgtacaagttttggcagacacaaccagtgcctgccttcgaggacgctggaaaaaaggagattgttcaaggacctatcaagatcatcgacccagagaaggtttctaagacccccgatgcgctcgttgagggatttgagtggtgtactcttgacctgacaaatgaggaagagctgaaagagctctacgagcttctcaacaagcattatgtcgaggatgataatgccatgttccgtttcaactactcggaatccttcctccattggtacgattgagtcttgaatatgttacctatctcagaatgttaatgctaaatatatagggccctgatgtctcctggatggaagaaggaatggcatgttggtgtacgcgccaccaagtcgcgcaagctggttgcatccatttgcggtgtcccgactgaactccgcgtccgcggcgagcgcctcaaggtgacggagatcaacttcctgtgtatccacaagaagctccgctccaagcgcttgacccccgttttgatcaaggagattacccgccgttgctacctcaggggcatctaccaggccatctacactggaggtataatcctacccacacccgtcagctcctgccgctactaccaccgttctctggattggttgaagctctacgatgttggcttctcgcctctgcctcatggctcgaccaaggcccgccaggtcactaagaatcatctgcctagccagacgtcgacacctggtctgcggcctatggagtccaaggacattgatgccgtctttgatttgctggagcgatacatgcggcgctttgacctgaaccaggcctttacacgggaagaaattgaccactggcttgtgtacaagaagcagccagggaaagaccaggttgtctggtcatacgttgccgaagacccagaaacccacaagatcactgattttgtctctttctacaatctcgagtctactgtgatcgacaatcccaaccatgattccgtccatgccgcatacctgtactactatgcaaccgagagcgcgttctctaacgacaagcaggctttcaaggagcgcttgcagctcttgatgaacgatgccctaatttgcgcaaagcaggtatgttgcaatgtgctatatctcattctacatgctaatctcgtcttttttattttatttgcttaggcccgtttcgacgtcttcaatgctctcacctcgcacgacaaccccctcttcctcgaggcgctcaagttcggtgctggcgatggccagctccacttctacctttataactatcgtgctgcacctatcggtggtggaattaactcgaaaaacttgcccgatgagtcgaagatgggaggtgtcggaatcgtcatgctgtaggcttgacgctttggctagtaaatctaacgtcggataccccggaaacgaattgcttttccttgtaccgtgctagcgatcaaaagaatatgaaaatcaaacgaacattttatataccaatgttttctggctagacttgtggctggccctagcgaatttcgtgttggcccagacagggaacactgaaagtacttgaggtattacacggctttccccgtttctatacttttaggaagaagctatcggaggaggcaagatctgttgagtacgaagagacttaatctaacgcgaggtctccgagaggagggaggctgagatcgggagtgttctggttactggagataggatatacccatcacatgatctggggtatcacatcaccacgtgataaaactgatggtcatgtggtcctgaggcgctgtcattacgtaattctcgctgatcatttgaagtctcaggcaggcataccatgcctcaggcaaccgactgacgtcgtcgcatggaattcggctccccatgttgacttactactgtttgtcgatgctgtggttttttcatcctgaacattttattcagcaacttttcctttccttcaaactccttgctcgatatcggctcttgagcactgcgacggaacgctgccgtagctagcagtggggtcatccccgcaacaaccatcaacgatgggtgcagcccagtcgaatgagcatggcgcatcatccccaggtaagttctatttgctatatctgtggttagttttatgagacacatgaatgttctactctctcgatcgaccgtaattgtcaataaatgcctcaattttgccatggatatttctccgtcttgtcaacaatagttgtctctgaccacatgcataaacagaagagttgagctacatgcttgctgagcgcttcgccacaaaatgctttacgccattagagctcacacatttcaaagacaacttcttctctcgggccttagagcagggaggcctgcggcactggaatgagaaagtcctttcagacttcttgggtatcccagacggtatctttacctcttcacaggaacaaccgttagatgcagggccggtgatttttcgcatggtttcttatctgggagcctttccattccaaaacacgctcgcgcccagtgtattgacctttgaggccatggttaaggtcgttgtgcttttgacagaccgctacgggaaagcgctgaagcgagggcacaaagaccgaatcaagttactctttggaagcttggctgatgtggggaggaagactcccgccgaggctaatggagaatgtacgaccgaggattccgaagcttcggctgggaattcccatgcgctggggttctctatagataaaccagccaatgatgattacgatgaagatgaggatgatgatctcgcacttgcagcactggactctctcgatgcgattgaagtattcaaacacgatcaccgtgttgacaagaccgtttatgagacccgaatttctatcgatacgttccgccgcttggttatgctactccttgtcattgcacccctgaagccattggattctttgaagatatatacatctggactggatgttcggcgtatggagtcggttaagaacgaggcagacagtattattgcggccttttcaccggaagagagtgatggggggatatcttacaagtcttttgcccggacgatatcactgtctcttccatatctattcgacccgctgactgcccttttcgagcacctgcttttcagcaaaaatctgaacctatctcaacgccgccataaaggtctagctacggagaccgaacccgaggagagcgaggagaacgaagaacctcccctacaacccgctgcacttacacttccgggaagtttcgaatcggccatattaaatccgacagttaattcgcatctttcgttcttcctcccatctatctcacccgatatcaatatcctccgaggtggcgtcaaactacatcccgtcttctctacaaacgcccacgggtcttccttaacatatttctcccaccacgtcctcacctggcaatctgccactctcctcatcctgcaaggggctctagtagattcaagcagtgaagagttgataacactaggggcctacattccccaaacgtggaaaaccgcctcatcgacctcaggctcatcttcaaaaacatctgacatcctcccctgtctctttcaactatccccaaagcacctcctcctcccgggaaacccctccccatccgcaaagaagcccaacaccccaatcgcctacttctcacccaacaccggcatcgcaatcggctgccaaatccccgctccgtcccgcacgcaccaaacctacccgaccccgcatggagcaggcagcctcataatcgacgcgaacatcgaaacggccgagttccacgccgcacccattggacacgacggcgccttcttacccgctagtaatacatcgcccgaagacccgcccacaaagatcaagcttgatctgtataccctggagatttggggcatcgttccagacccagaggcgtcatcatccgcagagacgaacttgggtcccgtggagattcagcgtgcaaagtgggaatttgaggcacgggaggctgagcgtcgtcgtaatatcaatatcaaggctggagctggggattcggcggccgagagtgcgaggtggcttttggaggcggctggtattattggagatgagtctagatattctggtgggaggggttagggtggtgggctgtgccgagcaagcacgtctgtttgaatgtcctacgtggtataacttctgcggcttggtgtccttggtgttgagattcgttatcggaatcctataataaatacctgccctaccagcctgaatttttcctactcaaatctcatcgcattttcagcagaatcttgctataccatccagtcgctgtcttctaaacatatgtagttcaggggcattgtattactttcgcaaaacgtgggtctgagagatgacaagtagtacatctctaaacgcaagatcttgaacattccatcgttgtacatttaagaaactgtcacacgtaaaaccttacacaaccttgggaagtacaagcatcattcgagtgccaccttcggtttagagtttcacataaatccgatctgtttcgaagggacccttcgatgaacctaacatcatgctttcaatggcggtaacccgcttggcgcatcatagaaatctttcagatcttcttcatcctcctcgaattcgaagccagaattctccccctccgattcgtcgccagcgagctgaacacgggaaagacgactgcgggttccggaaccgagattgcccgaagaagcaggtgttccgtccctttggaaggattctgagggcacctcgcgaggtagccgcatagctaggtacccatccggcgcacgttcggcgcgatccatgatatcattcatatatttgcgcacctcgtcggctggcttgacgactcgcgctagaggctcgaggattttggcattaggggcgtgaatgcggaacgttactggttgccagtattccttaaaatttgcctcattggcaggagtccctgggagcccgggggttaggatgcctgtttgatcggtgggttcctgcttttgtggtgttcccgttgtgggtgtgcatggctggctgggcgctgggctatcggttggtagtttgtccttgtctattttgactttcggttcactcttcttagctttcgatgcccctttgcctttgcttttggagttggcagcttctgtggcggtttcgagagggaaggttgtatttggaggaactttccggactaccaaaaacgaggcgatgactgtgttttcagctgggagccattccagaatggtatactcaggaaaaagatagcggtcacccgaaccggcatgacctgaagtactacttccgtatggagtcaagggagaagtgaattcaaacacgacagacttgtagtttatcggtggagatccaagtggagatacgtaagagattgaagccgggcgggggaatggaacaggcgtagtaaattggggtggtcgagactgaagtggaggttgtgacccataagaaggttgctggtggggggcatatggtggtccgggtcgtgctcctggctgctgagcgctggctggtggtgtcgggtttaccacgggagtctgctgctgcgtagtagaagcagtggctggggtgcttacagcaccaggaatcgctgatggggtcggaaccactgggcgcgctgcttcggacggcgcagactgggaggtgctgtgttctgtggctggttgctcttccttggcagcggtcgacccggtggcactctggggaggcttaggagcctggcttggtggatcttgcgcaggggtcggaggctgcgtctccgtcttcagaggtggctgcttcggacctttggatggggtctgcgatgtttgtggggatttctctagcgatactgacttcgtcccaccatgttgttgtttctgggtctgggtctggggttgtggagtgggggttgactgttgcgtaatgggttgtcctgctgaagattgctgccggtgttcttgctgctctcttgatttgatgattgcattgagttcgtcgatatgtgcttggaaagcccggagttgctcctgagatgcttggcttgacgcaacaacacgcatcaaggccttaagttcagggtcagcagctgcccttgtggctagcatttggatcacaggatctggactgggcttggctggctggctcttttgcccatgtggcggcttttgtcctccttgaggagagggtgcgttcgggccacgagcttgttggggcgaagggtggctgcctgtatacccagggcgacctggaggagcgggagaatattgcgcaggtcgttgttgattggatgacgtgggatacggtcggtattgttggaagttattagggtggccgtagtgaaccatcggtcgttgcgggggtgcgtattgcaatgccggcggcgcactgggatctttgacaatgtaaatcgtagcatcaaagaaatggggaccgatggtgacatcgcagggcccgatttttgccatagtgtcctttgacgggttgttcttctcgatctgctcgcgcttcgtcttcttcggctttgtgtagtatcgaacaagaatgccatcgctcagccactttttcttcgatcgttcgagtgaagcgaggagaaccgcactgttgagataagacagaataatgtcagtcatgcaacaccgatgggggccgcgatcgcaaacctttcggcgattgattggtactcattgtccgacaaggatagtgcctgtcgcgtgcggacaataggcaaaggatctccatccttaacctttgttggtaaaggagcgtcaactaattcgggggatggggcgcgaggagttggcgcctttttcttgtgagactgcggcgtggcttcggagacacgtcttttggctgcagattcgcggcggtcacgcgcggggagcttgcgcttttcagccatggagaattcaatgatataatcacgatacccacgatggaagtataacaaacattctataacggaagtttggatggagagaggatggaagggagaaatgagagagacgcgataacgcgccgcttatcgccgcctccgccaagattgtccgctcacctccgttggtggttgccaacagagattaatcaactcaaccccaaaacgcataatggttgagcttaagcctatttttaggaaggcttactggtcccttgcagcaggtggcctgctatacgtgctgtgtatcctctccttgaccttcccagaggttcaacgttcgtatgtatctagttccccccgggcctacctccagagtgagctaatatagataacacagtgttctttatgccaacaagatcaatcccagcttgtggcaggatgtcaaccaagtcgaacagtttggatttttaagtatggcatccctaggggaacaacggaagtatgtttgctaaccgatccccaaaggaacccaagtccaaccgtttcatttggttacgcccgacaatgaaaccatttacggctggcatttgatgcccttgcatctttgcctggagttcgaaaaggaattaatggagaatccctctacgggcccagcggaggactacacgaagacagttgcctacaagcttctcgccaatgaccccaatgcacgagttgtggttagctgtaagtgatagacaacctagattccgactgcaaaaaactgacaggcaagtccacggaaatgcggcgcatttgggttccgctcaacgccctgccacttacaactcgatgctaagcctatctaccccatcaaacccagtccacgtctttgcaattgactatcgcggctttggtgttagcactggaaatcccaccgaggaaggccttatcacggatggtgtgtccctcattaacttccttaccgcagggccattagaggttcccacctcccgcatcgtcatcgtgggccaaagtcttggaactgcagtaacaactgcagtggcagagcgttttgcattcggatcatctgacccagcagctatccaaccggctatcaagaacgccgatccatttgctggcgtggtcctattggcatctttcagcagcctagccaatctcatcgagtcctacagcttcaaaggcctcaccccgcctatgctctctcctatcatgggatatcctcgatctcaacagtggctgttgagccacattgtggaccactgggacacggctgggagactggcgcgtctcaccggcgttaatactacttccttgaacgctgtagatatgggctacattgataaaagccttgatctcacgatagttcatgcttttgatgatgctgaaattccctggtatgaaggacgccgcgtttgggaggctgcgacgggcagacatgtcaagggtgctcctggtgctatgacgtatctcaaatccgaggatggcaaccctagcgaggtcaagatctggaagaatgagatcagcaatgaagatggtagtgaggttgtcaaaacagtcagatgggaacggattcgatacggtggtatgttgaagcaacaccctctggctataaattcgacagactgaccataatcttttaggtcacaatcgcgttgcatcaggctcagtggctggtatcgctgttatgagggcttttgagcagtaatcggccgacatattgataatccctataaagcctcgggaaatacataaactcactgatcctagccagcgtaagggtcacggatggacagcgtaacgatctcaataaatgataaagtgcatgtctttcgttaattacacatagaatatgaggacctgtgggattgacgccgaaaatgaccgcttttgaggccagaaacggctgcctttccacccgtaactttggatgtccagccccttgaccgcccactgccctataataccactattctgcacccgcccagtagcgttagtcatcctccggtcctgatgttgacgctcgacttatacggtttttcccctcgtttctactggcaaccaaaacgacgccgaaaatggctccctttcagctgaattcaagtcccctcccttttcgcccagtctatttaagcgcctataatatacttcgccttccctcccctccggtatccttatacctctcattctcttatcctcgttacctatacctcgagacaacctcgactttatcgtttcctataatataaatttcctaccctagtctttgttctattcttctctatagtacctacgcctatatatccggcttaaaccgatgagtactaatactagaccgatcctattctttataaggaaacttaagtaagactagaatatttttgtagtattagatagctccctctaaactttaagctaaagaccttagaaggtatcgctattatcgaatattattagcgaaagtaagtacttacttagttaggaaaagtcttataactaagactaatataggaatagatattatattcaattaaatgaggattatatagactttctccttttagaggatctaataatctatataaacttttttgattagatatttaaaatattataaaagaaactgctttagttatataataaatactagcgatacctttattaatactttaagctattcgcctattactgtattagtaagaatacctattaatagatataacgagtaggttatatcctatctattcctaatagagtgtacttaccttagaaaagtttctcgaaggtatattcctagccgagcgtaaaattccccgataaataaaggacaaaaatattctagatatagatacttttaatatgatttaccggtattactaggtctattcgagattcttttatcacaggagtataattatttagtttactatagtctagctctagtccgctattataagtacacaacctagtatcttacttccttaagacagcttattacctagtaatctagttttaggtaaacgtaaatgggataacagcttctagagtgatcttctaaagtacatttccttaaaagatcttctagacttagtctactattgtaatatcgaacttttctatttaaaagacctttaaagtaaacataatatcctctgtactattatcgagttttataatcttaaaggttaactagaaggcgctaataggtaagctagaattttaggttagatttcttataaactaaccttaatactaatccttactaatagaactaaattctttatatatagcgattattaactagtatattacctaatagcacagatcattatatttactttccgcgatagagcttttactaatactaaccttatactaaagcttatttagtagctataagttctaagaggtagtttatctctttccctctaatagaagcctaaggttcttaatatacctctcctttaatatcttagatatactctatatagctatagacttaataggtctttactaataacctataattcaagctagcaggcgcttaaggagttaggttaagatactagatttaaagataatattaggtattacaatttttgctactagatagtaaataaagtcaatagtatatcacttactaaatataatataatagattcattttcgctataatagataggatctcttacaatagagctaactatctacttacagaaaattttactaaccaggagtaataaagggtacttaggtagtctagtaatataatatttaaaaagtattactaatcacaatttattatatataaccttcagtatattattcttcttcagctctcctaagaaggtctagtacactttactaagagtatacttaagaagagagatttattagtactatctaatcttaccgaaacttataaatatactatttactaaaaccctaaaattctataactaagatataagaaaagagagcttatagtagagatataatctatagctagtataattaagaatacctataatacctttctatacctcttccaaaggtataagaccattaaaaaagacctagctaaactttagaaatcattagtaatcgaaactcataagatagctagaaaggactattttaataatatccctatacttaaagttaactgatagattaagtaaatacttcttagtaaatctaatattaaggaatataatactaatagttctactaaagaaaactaggagctccctatcctagactatatatttcctaaacgagcttagcttatagagaacttttatagtcctaatgcagaagacttttataaagataaattacttacttaatatatctaggttactaaggacatagttacacttctactactttataagccaagtaagtaaggcaactatattaattagattcttaataaagaggaaaatatacctattaaatagcctaagtaactagtacctaataataatagataaatatatctaatagatatttgtattatctactttagtaaatcttatcgcttagtatctaaccctcctctacataaatttccttctaagtaaccagactcacttcatcgttatcttatcgactcttatctactttatatatataataggattagctataactaggaagtatactgtattcttcctaagtttactaaaatcaccgaatttttagcctatactaataaagaatataaatataatattaatattaaactatattatcttaccgaaaggctataggttagctatagtaatagttcttccagagaaatatctatagaatcagagaatcagtaaggcaccgaaacccccgcctcctctatcaattttaatataataaatattaatcctcaattaataagacccagccctattactatcgcgaagctattagcctacctatctaaaaccaatatttctacctccccttccctaataataaccactaacttaaattcagcagagatttctatacagcaagtaataaggggaatagtaaaggcagtaaatttagaacctagccctaagctagaatctttatcacagtatataacacgcttatcttaaaaaagtaggcacctaaaagagcagcctaaggggcagcagagggataaaggacaaccaggtaaaataaaggtatctactatcaaatatatactatatcgattaaagcgattataagctcagtgatttatataaccttagggataattcgttttatttatatatttagatatagtttaagagattaatagtagaccttatcttagaagtatttctagcttagtaatatataagttctagactatagtttacttcaaatagctataaagagtaacttatattctaatagtatttaaagattatattacagaataatagtatggtaattaggttaagttaggttatatagtaacaatagccttaggtccttttataaagctcttccttacctattcctagcgtttagggtagaaaagaataacttccatccctcctagaaggaatatatatataagaggctacctaccttcttttctcttttaatagttaaactagtcttatctttaatatataccggagttagataggtcacatttccctagttaaaggctctaatatcataaatactaagagagtataaggatatagcgttaaatcgtagaaagctctatataaaggccagctctatatatatagagcataataataacttgtatatatttagacttatataacgcagtagttacaaagctatatcacttttgataagctataggtatagggtatatctaaccagcttagtaagaggagttattagagagtcctaatcgaagcttagctatagagaatcattagaaggtttaagatatataagctaaataacctttaaagttaggttatagcccttaagagtagctagtaatagctagatataatacttataagacctcggttatattatatcaaacatctagtagtaatccctctcctaatcctcgtggccctttatattataaaatactaaaaccaattcttttaagttaaagaggagattaaaagtaagttttattaaagttaaatctctccctacttctataatctcttattacttagtatatatccgttatatcatcttataaatatatatatataaagggtgatcgcctaaaaggtattctattttatcctaatcctcactaccttctatatcatcgtagcctttacatatatcgatataattattaggggtaaggatttctattttaaaaatattatactcttatatttctagctaaacgtcagtcttttctatatataattagcttatagatccttaccaggattaagcaacattggggcaatatattcaaaggaaacaatatactaacgtaagcttaattttaaaatactttctaataggtcaaatctattattcaagaatttaatactaattttatgaaatagaacaggtaagcagacatcccttattcagcagctaataagtgaaagctatttgatttattaattatcaagacaattaacgatattaaagaggatttcggtagacagcagctctattctaattagttaatagacttaacggttctagaatctctctagaaagtgataccagaggatataaaagagctagattctacgcctttatataggtaaggctagatatatcgagtcgatgattagcttctaaggagataactaaacataatattcttaatcgcaataacgaaaccaaaatagatactatatactcacagtacgtcccaccgaagagccccggccacatagaagggaaaacgtcatataaactagctcttagtactacttctctccttatccaatcattctaggcataacccagacttagaatagtctagaggtaactaggaaatacgcacaatggttcttatctaatacctaccctgtcccagtaagggctagtgttattggcttattagctaaagggtgggcccctgcagtagccttcgattcagtggtagtctacacccctctagcagctgctttctttttagcagtctactaattaattgccaaactttaaagcagtcacagtgatacgatcatggtcagaatgatatataatcgcttagacattctatatctgagggccttcttctaaaacatatatatccctacctagccatcctttaatattaggcttaccttacttcagcgtaatactatgttactaatctttccttatactacctcccttgataagaattactctataatatataggagtaccccttctatctatatacatataacagataaaggtctgtataagagggaaatacatataaacctgcataggcttaggaaggaatatctatattattatatatctgtttcgatatcgatctataaggggttcgttatataaatataggtagatagatttccttatagtttaggacccccnnnnnnnnnnnnnnnnnnnnnnnnnnnnnnnnnnnnnnnnnnnnnnnnnnnnnnnnnnnnnnnnnnnnnnnnnnnnnnnnnnnnnnnnnnnnnnnnnnnnnnnnnnnnnnnnnnnnnnnnnnnnnnnnnnnnnnnnnnnnnnnnnnnnnnnnnnnnnnnnnnnnnnnnnnnnnnnnnnnnnnnnnnnnnnnnnnnnnnnnnnnnnnnnnnnnnnnnnnnnnnnnnnnnnnnnnnnnnnnnnnnnnnnnnnnnnnnnnnnnnnnnnnnnnnnnnnnnnnnnnnnnnnnnnnnnnnnnnnnnnnnnnnnnnnnnnnnnnnnnnnnnnnnnnnnnnnnnnnnnnnnnnnnnnnnnnnnnnnnnnnnnnnnnnnnnnnnnnnnnnnnnnnnnnnnnnnnnnnnnnnnnnnnnnnnnnnnnnnnnnnnnnnnnnnnnnnnnnnnnnnnnnnnnnnnnnnnnnnnnnnnnnnnnnnnnnnnnnnnnnnnnnnnnnnnnnnnnnnnnnnnnnnnnnnnnnnnnnnnnnnnnnnnnnnnnnnnnnnnnnnnnnnnnnnnnnnnnnnnnnnnnnnnnnnnnnnnnnnnnnnnnnnnnnnnnnnnnnnnnnnnnnnnnnnnnnnnnnnnnnnnnnnnnnnnnnnnnnnnnnnnnnnnnnnnnnnnnnnnnnnnnnnnnnnnnnnnnnnnnnnnnnnnnnnnnnnnnnnnnnnnnnnnnnnnnnnnnnnnnnnnnnnnnnnnnnnnnnnnnnnnnnnnnnnnnnnnnnnnnnnnnnnnnnnnnnnnnnnnnnnnnnnnnnnnnnnnnnnnnnnnnnnnnnnnnnnnnnnnnnnnnnnnnnnnnnnnnnnnnnnnnnnnnnnnnnnnnnnnnnnnnnnnnnnnnnnnnnnnnnnnnnnnnnnnnnnnnnnnnnnnnnnnnnnnnnnnnnnnnnnnnnnnnnnnnnnnnnnnnnnnnnnnnnnnnnnnnnnnnnnnnnnnnnnnnnnnnnnnnnnnnnnnnnnnnnnnnnnnnnnnnnnnnnnnnnnnnnnnnnnnnnnnnnnnnnnnnnnnnnnnnnnnnnnnnnnnnnnnnnnnnnnnnnnnnnnnnnnnnnnnnnnnnnnnnnnnnnnnnnnnnnnnnnnnnnnnnnnnnnnnnnnnnnnnnnnnnnnnnnnnnnnnnnnnnnnnnnnnnnnnnnnnnnnnnnnnnnnnnnnnnnnnnnnnnnnnnnnnnnnnnnnnnnnnnnnnnnnnnnnnnnnnnnnnnnnnnnnnnnnnnnnnnnnnnnnnnnnnnnnnnnnnnnnnnnnnnnnnnnnnnnnnnnnnnnnnnnnnnnnnnnnnnnnnnnnnnnnnnnnnnnnnnnnnnnnnnnnnnnnnnnnnnnnnnnnnnnnnnnnnnnnnnnnnnnnnnnnnnnnnnnnnnnnnnnnnnnnnnnnnnnnnnnnnnnnnnnnnnnnnnnnnnnnnnnnnnnnnnnnnnnnnnnnnnnnnnnnnnnnnnnnnnnnnnnnnnnnnnnnnnnnnnnnnnnnnnnnnnnnnnnnnnnnnnnnnnnnnnnnnnnnnnnnnnnnnnnnnnnnnnnnnnnnnnnnnnnnnnnnnnnnnnnnnnnnnnnnnnnnnnnnnnnnnnnnnnnnnnnnnnnnnnnnnnnnnnnnnnnnnnnnnnnnnnnnnnnnnnnnnnnnnnnnnnnnnnnnnnnnnnnnnnnnnnnnnnnnnnnnnnnnnnnnnnnnnnnnnnnnnnnnnnnnnnnnnnnnnnnnnnnnnnnnnnnnnnnnnnnnnnnnnnnnnnnnnnnnnnnnnnnnnnnnnnnnnnnnnnnnnnnnnnnnnnnnnnnnnnnnnnnnnnnnnnnnnnnnnnnnnnnnnnnnnnnnnnnnnnnnnnnnnnnnnnnnnnnnnnnnnnnnnnnnnnnnnnnnnnnnnnnnnnnnnnnnnnnnnnnnnnnnnnnnnnnnnnnnnnnnnnnnnnnnnnnnnnnnnnnnnnnnnnnnnnnnnnnnnnnnnnnnnnnnnnnnnnnnnnnnnnnnnnnnnnnnnnnnnnnnnnnnnnnnnnnnnnnnnnnnnnnnnnnnnnnnnnnnnnnnnnnnnnnnnnnnnnnnnnnnnnnnnnnnnnnnnnnnnnnnnnnnnnnnnnnnnnnnnnnnnnnnnnnnnnnnnnnnnnnnnnnnnnnnnnnnnnnnnnnnnnnnnnnnnnnnnnnnnnnnnnnnnnnnnnnnnnnnnnnnnnnnnnnnnnnnnnnnnnnnnnnnnnnnnnnnnnnnnnnnnnnnnnnnnnnnnnnnnnnnnnnnnnnnnnnnnnnnnnnnnnnnnnnnnnnnnnnnnnnnnnnnnnnnnnnnnnnnnnnnnnnnnnnnnnnnnnnnnnnnnnnnnnnnnnnnnnnnnnnnnnnnnnnnnnnnnnnnnnnnnnnnnnnnnnnnnnnnnnnnnnnnnnnnnnnnnnnnnnnnnnnnnnnnnnnnnnnnnnnnnnnnnnnnnnnnnnnnnnnnnnnnnnnnnnnnnnnnnnnnnnnnnnnnnnnnnnnnnnnnnnnnnnnnnnnnnnnnnnnnnnnnnnnnnnnnnnnnnnnnnnnnnnnnnnnnnnnnnnnnnnnnnnnnnnnnnnnnnnnnnnnnnnnnnnnnnnnnnnnnnnnnnnnnnnnnnnnnnnnnnnnnnnnnnnnnnnnnnnnnnnnnnnnnnnnnnnnnnnnnnnnnnnnnnnnnnnnnnnnnnnnnnnnnnnnnnnnnnnnnnnnnnnnnnnnnnnnnnnnnnnnnnnnnnnnnnnnnnnnnnnnnnnnnnnnnnnnnnnnnnnnnnnnnnnnnnnnnnnnnnnnnnnnnnnnnnnnnnnnnnnnnnnnnnnnnnnnnnnnnnnnnnnnnnnnnnnnnnnnnnnnnnnnnnnnnnnnnnnnnnnnnnnnnnnnnnnnnnnnnnnnnnnnnnnnnnnnnnnnnnnnnnnnnnnnnnnnnnnnnnnnnnnnnnnnnnnnnnnnnnnnnnnnnnnnnnnnnnnnnnnnnnnnnnnnnnnnnnnnnnnnnnnnnnnnnnnnnnnnnnnnnnnnnnnnnnnnnnnnnnnnnnnnnnnnnnnnnnnnnnnnnnnnnnnnnnnnnnnnnnnnnnnnnnnnnnnnnnnnnnnnnnnnnnnnnnnnnnnnnnnnnnnnnnnnnnnnnnnnnnnnnnnnnnnnnnnnnnnnnnnnnnnnnnnnnnnnnnnnnnnnnnnnnnnnnnnnnnnnnnnnnnnnnnnnnnnnnnnnnnnnnnnnnnnnnnnnnnnnnnnnnnnnnnnnnnnnnnnnnnnnnnnnnnnnnnnnnnnnnnnnnnnnnnnnnnnnnnnnnnnnnnnnnnnnnnnnnnnnnnnnnnnnnnnnnnnnnnnnnnnnnnnnnnnnnnnnnnnnnnnnnnnnnnnnnnnnnnnnnnnnnnnnnnnnnnnnnnnnnnnnnnnnnnnnnnnnnnnnnnnnnnnnnnnnnnnnnnnnnnnnnnnnnnnnnnnnnnnnnnnnnnnnnnnnnnnnnnnnnnnnnnnnnnnnnnnnnnnnnnnnnnnnnnnnnnnnnnnnnnnnnnnnnnnnnnnnnnnnnnnnnnnnnnnnnnnnnnnnnnnnnnnnnnnnnnnnnnnnnnnnnnnnnnnnnnnnnnnnnnnnnnnnnnnnnnnnnnnnnnnnnnnnnnnnnnnnnnnnnnnnnnnnnnnnnnnnnnnnnnnnnnnnnnnnnnnnnnnnnnnnnnnnnnnnnnnnnnnnnnnnnnnnnnnnnnnnnnnnnnnnnnnnnnnnnnnnnnnnnnnnnnnnnnnnnnnnnnnnnnnnnnnnnnnnnnnnnnnnnnnnnnnnnnnnnnnnnnnnnnnnnnnnnnnnnnnnnnnnnnnnnnnnnnnnnnnnnnnnnnnnnnnnnnnnnnnnnnnnnnnnnnnnnnnnnnnnnnnnnnnnnnnnnnnnnnnnnnnnnnnnnnnnnnnnnnnnnnnnnnnnnnnnnnnnnnnnnnnnnnnnnnnnnnnnnnnnnnnnnnnnnnnnnnnnnnnnnnnnnnnnnnnnnnnnnnnnnnnnnnnnnnnnnnnnnnnnnnnnnnnnnnnnnnnnnnnnnnnnnnnnnnnnnnnnnnnnnnnnnnnnnnnnnnnnnnnnnnnnnnnnnnnnnnnnnnnnnnnnnnnnnnnnnnnnnnnnnnnnnnnnnnnnnnnnnnnnnnnnnnnnnnnnnnnnnnnnnnnnnnnnnnnnnnnnnnnnnnnnnnnnnnnnnnnnnnnnnnnnnnnnnnnnnnnnnnnnnnnnnnnnnnnnnnnnnnnnnnnnnnnnnnnnnnnnnnnnnnnnnnnnnnnnnnnnnnnnnnnnnnnnnnnnnnnnnnnnnnnnnnnnnnnnnnnnnnnnnnnnnnnnnnnnnnnnnnnnnnnnnnnnnnnnnnnnnnnnnnnnnnnnnnnnnnnnnnnnnnnnnnnnnnnnnnnnnnnnnnnnnnnnnnnnnnnnnnnnnnnnnnnnnnnnnnnnnnnnnnnnnnnnnnnnnnnnnnnnnnnnnnnnnnnnnnnnnnnnnnnnnnnnnnnnnnnnnnnnnnnnnnnnnnnnnnnnnnnnnnnnnnnnnnnnnnnnnnnnnnnnnnnnnnnnnnnnnnnnnnnnnnnnnnnnnnnnnnnnnnnnnnnnnnnnnnnnnnnnnnnnnnnnnnnnnnnnnnnnnnnnnnnnnnnnnnnnnnnnnnnnnnnnnnnnnnnnnnnnnnnnnnnnnnnnnnnnnnnnnnnnnnnnnnnnnnnnnnnnnnnnnnnnnnnnnnnnnnnnnnnnnnnnnnnnnnnnnnnnnnnnnnnnnnnnnnnnnnnnnnnnnnnnnnnnnnnnnnnnnnnnnnnnnnnnnnnnnnnnnnnnnnnnnnnnnnnnnnnnnnnnnnnnnnnnnnnnnnnnnnnnnnnnnnnnnnnnnnnnnnnnnnnnnnnnnnnnnnnnnnnnnnnnnnnnnnnnnnnnnnnnnnnnnnnnnnnnnnnnnnnnnnnnnnnnnnnnnnnnnnnnnnnnnnnnnnnnnnnnnnnnnnnnnnnnnnnnnnnnnnnnnnnnnnnnnnnnnnnnnnnnnnnnnnnnnnnnnnnnnnnnnnnnnnnnnnnnnnnnnnnnnnnnnnnnnnnnnnnnnnnnnnnnnnnnnnnnnnnnnnnnnnnnnnnnnnnnnnnnnnnnnnnnnnnnnnnnnnnnnnnnnnnnnnnnnnnnnnnnnnnnnnnnnnnnnnnnnnnnnnnnnnnnnnnnnnnnnnnnnnnnnnnnnnnnnnnnnnnnnnnnnnnnnnnnnnnnnnnnnnnnnnnnnnnnnnnnnnnnnnnnnnnnnnnnnnnnnnnnnnnnnnnnnnnnnnnnnnnnnnnnnnnnnnnnnnnnnnnnnnnnnnnnnnnnnnnnnnnnnnnnnnnnnnnnnnnnnnnnnnnnnnnnnnnnnnnnnnnnnnnnnnnnnnnnnnnnnnnnnnnnnnnnnnnnnnnnnnnnnnnnnnnnnnnnnnnnnnnnnnnnnnnnnnnnnnnnnnnnnnnnnnnnnnnnnnnnnnnnnnnnnnnnnnnnnnnnnnnnnnnnnnnnnnnnnnnnnnnnnnnnnnnnnnnnnnnnnnnnnnnnnnnnnnnnnnnnnnnnnnnnnnnnnnnnnnnnnnnnnnnnnnnnnnnnnnnnnnnnnnnnnnnnnnnnnnnnnnnnnnnnnnnnnnnnnnnnnnnnnnnnnnnnnnnnnnnnnnnnnnnnnnnnnnnnnnnnnnnnnnnnnnnnnnnnnnnnnnnnnnnnnnnnnnnnnnnnnnnnnnnnnnnnnnnnnnnnnnnnnnnnnnnnnnnnnnnnnnnnnnnnnnnnnnnnnnnnnnnnnnnnnnnnnnnnnnnnnnnnnnnnnnnnnnnnnnnnnnnnnnnnnnnnnnnnnnnnnnnnnnnnnnnnnnnnnnnnnnnnnnnnnnnnnnnnnnnnnnnnnnnnnnnnnnnnnnnnnnnnnnnnnnnnnnnnnnnnnnnnnnnnnnnnnnnnnnnnnnnnnnnnnnnnnnnnnnnnnnnnnnnnnnnnnnnnnnnnnnnnnnnnnnnnnnnnnnnnnnnnnnnnnnnnnnnnnnnnnnnnnnnnnnnnnnnnnnnnnnnnnnnnnnnnnnnnnnnnnnnnnnnnnnnnnnnnnnnnnnnnnnnnnnnnnnnnnnnnnnnnnnnnnnnnnnnnnnnnnnnnnnnnnnnnnnnnnnnnnnnnnnnnnnnnnnnnnnnnnnnnnnnnnnnnnnnnnnnnnnnnnnnnnnnnnnnnnnnnnnnnnnnnnnnnnnnnnnnnnnnnnnnnnnnnnnnnnnnnnnnnnnnnnnnnnnnnnnnnnnnnnnnnnnnnnnnnnnnnnnnnnnnnnnnnnnnnnnnnnnnnnnnnnnnnnnnnnnnnnnnnnnnnnnnnnnnnnnnnccctaggggcccctccgagactagtaagaattagtcttagtatactattaatatattgtgttccctctataaagccctttatatcttacctggttgataggccgtatacccgcataacgtatacctttacagacttactttagtaaattatcgatagatttagaggccgatctttctatagatacaacttacgcctactatctcttagccacatttattcctcctagtaagccagagactttcgcttactttagaatggagcctgaagcctaccttagtctatacattaaaggcagggttatagtatagatatagactgactaaaagaagattattaatacccttacttaccctagactagctattaagggaattgcagctattgggcctaccttagatatttacggctaggtgatttccctagggaatcgatttattacagttctaatactaagatcaaatccagattcgcggtaagatcatactcttcggcttacttaatataggagcaaagatgtctttcagaaaggctgaagtcttttagccttaggacaataacttataagacaaatatttaaacctacttagccttaagagtaagactaaatctccggctccaggtacagttaaaccagtattccacgctagagtcgccgtcgatacacagattaatgttcttatcaccctataagccagtattagtatcaagattagtggcagcaagattattaccggcaagaccttgatagatacttagctaagtagctatataaacactgacctctccttctaggcttatagtaactacgatacgtctaataataccttctactactaatttagggcctatctgtactataatatttgtcagaatctaggatgaatactgtcatttttcatccctgatacagttggatcacgtgactnnnnnnnnnnnnnnnnnnnnnnnnnnnnnnnnnnnnnnnnnnnnnnnnnnnnnnnnnnnnnnnnnnnnnnnnnnnnnnnnnnnnnnnnnnnnnnnnnnnnnnnnnnnnnnnnnnnnnnnnnnnnnnnnnnnnnnnnnnnnnnnnnnnnnnnnnnnnnnnnnnnnnnnnnnnnnnnnnnnnnnnnnnnnnnnnnnnnnnnnnnnnnnnnnnnnnnnnnnnnnnnnnnnnnnnnnnnnnnnnnnnnnnnnnnnnnnnnnnnnnnnnnnnnnnnnnnnnnnnnnnnnnnnnnnnnnnnnnnnnnnnnnnnnnnnnnnnnnnnnnnnnnnnnnnnnnnnnnnnnnnnnnnnnnnnnnnnnnnnnnnnnnnnnnnnnnnnnnnnnnnnnnnnnnnnnnnnnnnnnnnnnnnnnnnnnnnnnnnnnnnnnnnnnnnnnnnnnnnnnnnnnnnnnnnnnnnnnnnnnnnnnnnnnnnnnnnnnnnnnnnnnnnnnnnnnnnnnnnnnnnnnnnnnnnnnnnnnnnnnnnnnnnnnnnnnnnnnnnnnnnnnnnnnnnnnnnnnnnnnnnnnnnnnnnnnnnnnnnnnnnnnnnnnnnnnnnnnnnnnnnnnnnnnnnnnnnnnnnnnnnnnnnnnnnnnnnnnnnnnnnnnnnnnnnnnnnnnnnnnnnnnnnnnnnnnnnnnnnnnnnnnnnnnnnnnnnnnnnnnnnnnnnnnnnnnnnnnnnnnnnnnnnnnnnnnnnnnnnnnnnnnnnnnnnnnnnnnnnnnnnnnnnnnnnnnnnnnnnnnnnnnnnnnnnnnnnnnnnnnnnnnnnnnnnnnnnnnnnnnnnnnnnnnnnnnnnnnnnnnnnnnnnnnnnnnnnnnnnnnnnnnnnnnnnnnnnnnnnnnnnnnnnnnnnnnnnnnnnnnnnnnnnnnnnnnnnnnnnnnnnnnnnnnnnnnnnnnnnnnnnnnnnnnnnnnnnnnnnnnnnnnnnnnnnnnnnnnnnnnnnnnnnnnnnnnnnnnnnnnnnnnnnnnnnnnnnnnnnnnnnnnnnnnnnnnnnnnnnnnnnnnnnnnnnnnnnnnnnnnnnnnnnnnnnnnnnnnnnnnnnnnnnnnnnnnnnnnnnnnnnnnnnnnnnnnnnnnnnnnnnnnnnnnnnnnnnnnnnnnnnnnnnnnnnnnnnnnnnnnnnnnnnnnnnnnnnnnnnnnnnnnnnnnnnnnnnnnnnnnnnnnnnnnnnnnnnnnnnnnnnnnnnnnnnnnnnnnnnnnnnnnnnnnnnnnnnnnnnnnnnnnnnnnnnnnnnnnnnnnnnnnnnnnnnnnnnnnnnnnnnnnnnnnnnnnnnnnnnnnnnnnnnnnnnnnnnnnnnnnnnnnnnnnnnnnnnnnnnnnnnnnnnnnnnnnnnnnnnnnnnnnnnnnnnnnnnnnnnnnnnnnnnnnnnnnnnnnnnnnnnnnnnnnnnnnnnnnnnnnnnnnnnnnnnnnnnnnnnnnnnnnnnnnnnnnnnnnnnnnnnnnnnnnnnnnnnnnnnnnnnnnnnnnnnnnnnnnnnnnnnnnnnnnnnnnnnnnnnnnnnnnnnnnnnnnnnnnnnnnnnnnnnnnnnnnnnnnnnnnnnnnnnnnnnnnnnnnnnnnnnnnnnnnnnnnnnnnnnnnnnnnnnnnnnnnnnnnnnnnnnnnnnnnnnnnnnnnnnnnnnnnnnnnnnnnnnnnnnnnnnnnnnnnnnnnnnnnnnnnnnnnnnnnnnnnnnnnnnnnnnnnnnnnnnnnnnnnnnnnnnnnnnnnnnnnnnnnnnnnnnnnnnnnnnnnnnnnnnnnnnnnnnnnnnnnnnnnnnnnnnnnnnnnnnnnnnnnnnnnnnnnnnnnnnnnnnnnnnnnnnnnnnnnnnnnnnnnnnnnnnnnnnnnnnnnnnnnnnnnnnnnnnnnnnnnnnnnnnnnnnnnnnnnnnnnnnnnnnnnnnnnnnnnnnnnnnnnnnnnnnnnnnnnnnnnnnnnnnnnnnnnnnnnnnnnnnnnnnnnnnnnnnnnnnnnnnnnnnnnnnnnnnnnnnnnnnnnnnnnnnnnnnnnnnnnnnnnnnnnnnnnnnnnnnnnnnnnnnnnnnnnnnnnnnnnnnnnnnnnnnnnnnnnnnnnnnnnnnnnnnnnnnnnnnnnnnnnnnnnnnnnnnnnnnnnnnnnnnnnnnnnnnnnnnnnnnnnnnnnnnnnnnnnnnnnnnnnnnnnnnnnnnnnnnnnnnnnnnnnnnnnnnnnnnnnnnnnnnnnnnnnnnnnnnnnnnnnnnnnnnnnnnnnnnnnnnnnnnnnnnnnnnnnnnnnnnnnnnnnnnnnnnnnnnnnnnnnnnnnnnnnnnnnnnnnnnnnnnnnnnnnnnnnnnnnnnnnnnnnnnnnnnnnnnnnnnnnnnnnnnnnnnnnnnnnnnnnnnnnnnnnnnnnnnnnnnnnnnnnnnnnnnnnnnnnnnnnnnnnnnnnnnnnnnnnnnnnnnnnnnnnnnnnnnnnnnnnnnnnnnnnnnnnnnnnnnnnnnnnnnnnnnnnnnnnnnnnnnnnnnnnnnnnnnnnnnnnnnnnnnnnnnnnnnnnnnnnnnnnnnnnnnnnnnnnnnnnnnnnnnnnnnnnnnnnnnnnnnnnnnnnnnnnnnnnnnnnnnnnnnnnnnnnnnnnnnnnnnnnnnnnnnnnnnnnnnnnnnnnnnnnnnnnnnnnnnnnnnnnnnnnnnnnnnnnnnnnnnnnnnnnnnnnnnnnnnnnnnnnnnnnnnnnnnnnnnnnnnnnnnnnnnnnnnnnnnnnnnnnnnnnnnnnnnnnnnnnnnnnnnnnnnnnnnnnnnnnnnnnnnnnnnnnnnnnnnnnnnnnnnnnnnnnnnnnnnnnnnnnnnnnnnnnnnnnnnnnnnnnnnnnnnnnnnnnnnnnnnnnnnnnnnnnnnnnnnnnnnnnnnnnnnnnnnnnnnnnnnnnnnnnnnnnnnnnnnnnnnnnnnnnnnnnnnnnnnnnnnnnnnnnnnnnnnnnnnnnnnnnnnnnnnnnnnnnnnnnnnnnnnnnnnnnnnnnnnnnnnnnnnnnnnnnnnnnnnnnnnnnnnnnnnnnnnnnnnnnnnnnnnnnnnnnnnnnnnnnnnnnnnnnnnnnnnnnnnnnnnnnnnnnnnnnnnnnnnnnnnnnnnnnnnnnnnnnnnnnnnnnnnnnnnnnnnnnnnnnnnnnnnnnnnnnnnnnnnnnnnnnnnnnnnnnnnnnnnnnnnnnnnnnnnnnnnnnnnnnnnnnnnnnnnnnnnnnnnnnnnnnnnnnnnnnnnnnnnnnnnnnnnnnnnnnnnnnnnnnnnnnnnnnnnnnnnnnnnnnnnnnnnnnnnnnnnnnnnnnnnnnnnnnnnnnnnnnnnnnnnnnnnnnnnnnnnnnnnnnnnnnnnnnnnnnnnnnnnnnnnnnnnnnnnnnnnnnnnnnnnnnnnnnnnnnnnnnnnnnnnnnnnnnnnnnnnnnnnnnnnnnnnnnnnnnnnnnnnnnnnnnnnnnnnnnnnnnnnnnnnnnnnnnnnnnnnnnnnnnnnnnnnnnnnnnnnnnnnnnnnnnnnnnnnnnnnnnnnnnnnnnnnnnnnnnnnnnnnnnnnnnnnnnnnnnnnnnnnnnnnnnnnnnnnnnnnnnnnnnnnnnnnnnnnnnnnnnnnnnnnnnnnnnnnnnnnnnnnnnnnnnnnnnnnnnnnnnnnnnnnnnnnnnnnnnnnnnnnnnnnnnnnnnnnnnnnnnnnnnnnnnnnnnnnnnnnnnnnnnnnnnnnnnnnnnnnnnnnnnnnnnnnnnnnnnnnnnnnnnnnnnnnnnnnnnnnnnnnnnnnnnnnnnnnnnnnnnnnnnnnnnnnnnnnnnnnnnnnnnnnnnnnnnnnnnnnnnnnnnnnnnnnnnnnnnnnnnnnnnnnnnnnnnnnnnnnnnnnnnnnnnnnnnnnnnnnnnnnnnnnnnnnnnnnnnnnnnnnnnnnnnnnnnnnnnnnnnnnnnnnnnnnnnnnnnnnnnnnnnnnnnnnnnnnnnnnnnnnnnnnnnnnnnnnnnnnnnnnnnnnnnnnnnnnnnnnnnnnnnnnnnnnnnnnnnnnnnnnnnnnnnnnnnnnnnnnnnnnnnnnnnnnnnnnnnnnnnnnnnnnnnnnnnnnnnnnnnnnnnnnnnnnnnnnnnnnnnnnnnnnnnnnnnnnnnnnnnnnnnnnnnnnnnnnnnnnnnnnnnnnnnnnnnnnnnnnnnnnnnnnnnnnnnnnnnnnnnnnnnnnnnnnnnnnnnnnnnnnnnnnnnnnnnnnnnnnnnnnnnnnnnnnnnnnnnnnnnnnnnnnnnnnnnnnnnnnnnnnnnnnnnnnnnnnnnnnnnnnnnnnnnnnnnnnnnnnnnnnnnnnnnnnnnnnnnnnnnnnnnnnnnnnnnnnnnnnnnnnnnnnnnnnnnnnnnnnnnnnnnnnnnnnnnnnnnnnnnnnnnnnnnnnnnnnnnnnnnnnnnnnnnnnnnnnnnnnnnnnnnnnnnnnnnnnnnnnnnnnnnnnnnnnnnnnnnnnnnnnnnnnnnnnnnnnnnnnnnnnnnnnnnnnnnnnnnnnnnnnnnnnnnnnnnnnnnnnnnnnnnnnnnnnnnnnnnnnnnnnnnnnnnnnnnnnnnnnnnnnnnnnnnnnnnnnnnnnnnnnnnnnnnnnnnnnnnnnnnnnnnnnnnnnnnnnnnnnnnnnnnnnnnnnnnnnnnnnnnnnnnnnnnnnnnnnnnnnnnnnnnnnnnnnnnnnnnnnnnnnnnnnnnnnnnnnnnnnnnnnnnnnnnnnnnnnnnnnnnnnnnnnnnnnnnnnnnnnnnnnnnnnnnnnnnnnnnnnnnnnnnnnnnnnnnnnnnnnnnnnnnnnnnnnnnnnnnnnnnnnnnnnnnnnnnnnnnnnnnnnnnnnnnnnnnnnnnnnnnnnnnnnnnnnnnnnnnnnnnnnnnnnnnnnnnnnnnnnnnnnnnnnnnnnnnnnnnnnnnnnnnnnnnnnnnnnnnnnnnnnnnnnnnnnnnnnnnnnnnnnnnnnnnnnnnnnnnnnnnnnnnnnnnnnnnnnnnnnnnnnnnnnnnnnnnnnnnnnnnnnnnnnnnnnnnnnnnnnnnnnnnnnnnnnnnnnnnnnnnnnnnnnnnnnnnnnnnnnnnnnnnnnnnnnnnnnnnnnnnnnnnnnnnnnnnnnnnnnnnnnnnnnnnnnnnnnnnnnnnnnnnnnnnnnnnnnnnnnnnnnnnnnnnnnnnnnnnnnnnnnnnnnnnnnnnnnnnnnnnnnnnnnnnnnnnnnnnnnnnnnnnnnnnnnnnnnnnnnnnnnnnnnnnnnnnnnnnnnnnnnnnnnnnnnnnnnnnnnnnnnnnnnnnnnnnnnnnnnnnnnnnnnnnnnnnnnnnnnnnnnnnnnnnnnnnnnnnnnnnnnnnnnnnnnnnnnnnnnnnnnnnnnnnnnnnnnnnnnnnnnnnnnnnnnnnnnnnnnnnnnnnnnnnnnnnnnnnnnnnnnnnnnnnnnnnnnnnnnnnnnnnnnnnnnnnnnnnnnnnnnnnnnnnnnnnnnnnnnnnnnnnnnnnnnnnnnnnnnnnnnnnnnnnnnnnnnnnnnnnnnnnnnnnnnnnnnnnnnnnnnnnnnnnnnnnnnnnnnnnnnnnnnnnnnnnnnnnnnnnnnnnnnnnnnnnnnnnnnnnnnnnnnnnnnnnnnnnnnnnnnnnnnnnnnnnnnnnnnnnnnnnnnnnnnnnnnnnnnnnnnnnnnnnnnnnnnnnnnnnnnnnnnnnnnnnnnnnnnnnnnnnnnnnnnnnnnnnnnnnnnnnnnnnnnnnnnnnnnnnnnnnnnnnnnnnnnnnnnnnnnnnnnnnnnnnnnnnnnnnnnnnnnnnnnnnnnnnnnnnnnnnnnnnnnnnnnnnnnnnnnnnnnnnnnnnnnnnnnnnnnnnnnnnnnnnnnnnnnnnnnnnnnnnnnnnnnnnnnnnnnnnnnnnnnnnnnnnnnnnnnnnnnnnnnnnnnnnnnnnnnnnnnnnnnnnnnnnnnnnnnnnnnnnnnnnnnnnnnnnnttgttttgtttgttttgattactaagttgtccatcagattgtcatgttttaggactattgtcagttttagagagttagagaatttattaagatttttctgccacaaaatacactcgccttaccaccgtttttccgtcaatattagatataaggctctagctaagattctcagctttattaactaggcaacaggtaatcgtaaggcatatttacctgataaaatgctcaaattatacgaaaagactggtaccattccgatattagaatctaatatagggaagcgaggcctttctatagaagccgatacttaagagtatgaaattacagtagacctatctaaaaatagcacaatatctatcttagaaacagctgccgatatatttcgccgagctaatattacaactttaggtacaaaatctgtgacaagtgtattaatcagtatcagaaactaactagttacctagaccctaaaacccccaagttcataaaacagggccattatccagccggagctagtagcttctagctaccagaattgcgatataagtttagaagttttcgtcgaatgtaacattttcttttgtagactgactaagcatgtattaacagtcaattgcggcttttttggtccgtaccaggccataaatgagatccttgataccgacggagatcttcaggaaaggctgacatatgatatgcccggcctctgtgataatatcgttaatcttacgccattacgcttaaagttcacattctcctaggacggggtaacagccagacgcaactcagtttacccgagaaagacagtcggtggccagagtgtaacaaaatgttcggcaccaactgctgagcttaacaaggcagttaggcgaaggggcttgagcctccagtgtgatgaatttccctgggggtctagtgagcagggaggagaatggctacctgcgagtcagcgtcgtacggagtgtgtcaccagcttccagaatgcatggcacggaaattgcgtccgtaagtgcttaattctttttcatctataattgggttgttctggattctgtgggaaacttgctaataaatttttagaattggttggacaactttcatcgaactggaaacaactggaccctgagtcccggaaagattccaagaagatagattattgggcatcatggcagaaacgaaccggtaagcttatattctatttcttcgcaattgggctatctaacactatgtctttttgcgttagactggacccacgcgggcaagtatgggatagggcaaaacataccatatgaacaaaaactcattgaatacggcgaagaaatgcctcctccagatggtggggaccaggtatgtattcaatttcaggatttaggaatttacctaacaaagcggtgacagggagataacaagaagctatcgtgggcttttaaacgggactatgagacttcctggcttaaccctcaaacaccactcacgtccgcagactggtggaatgccaaccaaccgacatggtacaaacccaaatacaatgggcctcttaccatggactcggttctttgcgcggtcaatcattttaatcagggcaacgtgtataaactacctggtgtgaaagtcaagtcagatggaacaccaatcggcgtgcaaaaagagtacaacgcatattgcaaaagaaccaaccagggtggtatggccccccctgcttggggcgtcgattttaccatgggaagatgtctcattcgtttccaaaacagcgcaagcagcagctcgggcacatctaaacgggacgctcagaagtggggtgaatgggaagttgaaagtatgtggacgccgaacgatgtctactcaagcgcttgctgattctccttttaggcattgaatatgtggaggatgtggacgatgccgagatggctcagttattgaagcctgcggatctggatggttctgaacatgaaaggtaacttgccttgaatgtcgatgaattttttattttttatttctttggcggagcagacagccatttgcaagacgccggaaaacggactctcctgttggagcgaattccgaagtgtctggcaactttttcaccttttagttcaccctatctagtgtatatgcaacaccacgttcttcatttcatctattgattagggtctgcaagttcttcttccgtcaattgatacagttccctccctaattctgcactggctcgatacttttccccaacagtagagccctcaaggaattcgttggtttccatccatgtaccaatcacaccaaagagatcgtgaatctcaggatccatacgaccttcgcgaatgacgtttcggaaaccatctaaataaagcacatacaaacttccagaccggaaagcctcctcgtccgcaaggataagatacgtcctcgtggcgcatttttgtaaccctatcgcgaggctatcgatgattgtgtctcggtcatcgcgccaagcctccggggcttcttcttttgcttcggcaatttgcgttttgagatcagagcggaaagtttcaaggtcttctgctttacgggcgcgcggaatcctcattctatcatcgacctcgggttcaagtgggcccgcaagttcgggaagaatctcgtacacacgccgccactccgatccgaagttgaagagatccgcattattgagaaccgcccaccaggcttctgattcaaagggatctgaatcgacccattcagacattaaatcatcgtgtctggctttctcttcttcgtcggtgcaatagtgcgtgcgtagtaaagcgggacaagtctggtcattgaaaagattcattgcgtgccatcgaagcacgtcgctgcggtaaggtcggagaattgtgtccacctcctctgttgtaggcgcacgtggcggatcgatacccgctggaaggctatcccaatcttcggcccattcaaggggaataaattccatgtcgaggaactcagtgaccaacatttttcgttgctagtcgggggttttggtggaggagttattccagtttatctgcacaggattagcatctgaagtagaaacaaaaaggcacaacatacgataagatattgttcgacagccagtgtaccccatggaggaggaggcaaagaatccatgtcattcatcacgaggaaaggttaggaagcttaaagagaagataaaaggggaagatgcggaagagacaccggggaggggtgtggagagcggggctgatatggtgaggaacgcacaaatcattcctttaacctataatcctttgatacacacaagtgaatattaactacatgctcttactaactataacttagttaataccttgcctaaaagatggaaaacacaggtttaaagaggtagtgaatatcgcttttttcttatactcagcccgaagcaatcaccacccggcatttcgctggcacataccgcgcctaacctaaagtggctagaaatagcacgtgacagacacatcttacgggacttgaacggtccgtttgagctcttatggaccatacacggttaacaggcccagctttgaaaatgtggagagaatccgaggtctacattatacaatgcaacgatgacttcacctagtgcgttatatacctcccgcgtatgatagtagcaaacattcacattctccttcaaccctaattatgcgtatgtatcagctaggaacggaatagggaagaagatcggactagtcttatacactattgagcccaagactcatcacattttcgcagaggaaccgctatgcatgccagactaataggattccctcggctggcggcgagtaaatacagccatcttacagggggggggtgtatgtgtgtgaaatcatttaccctgagccctcgcgaacgatatgcagataccactactatatatatccgtgtacgtacatgtagagtgttccacttcctgaaaacgaacctagagcctcatcaaggcctggcgtggcttaattgcccttcccattattaggttgccccggtggcgcgcgactccgaaaccgttgtgacgcctcggcaaagtccagcacggccttgaccgtcctggctcgcgagacggtgtccggtttacctttctcaccttgttttgagcctcccagcaggctcgacacactattaagcgcatctccaacttctctcctcagctctctccgcggttccctcaagtttgggcaatccaccatcgcatgggtgactgtttcttgtgcgccgcatgcgcactggtcgtcgtcactataaatcaggatctcccgccccgggtacagttgagtcagtgttccacgctggagtcgccatcgatgcacagattgatgttctcattgacccacaagccagcgttggtatcaagattggtggcggcaagattgttgcgggtaaaaccttgatggatgctcagctgagtggctatgtgaacaccgacgtctccttccaggctcatggtgactacgacacatctgacaatgcattccactaccgatttggggcatatctgtactataacattggttataaggcagtggccaagatcttagacttcgttgactgggcaacaggagatcgcacgtgaatcattagcgtatagatggtgcctattccattggcannnnnnnnnnnnnnnnnnnnnnnnnnnnnnnnnnnnnnnnnnnnnnnnnnnnnnnnnnnnnnnnnnnnnnnnnnnnnnnnnnnnnnnnnnnnnnnnnnnnnnnnnnnnnnnnnnnnnnnnnnnnnnnnnnnnnnnnnnnnnnnnnnnnnnnnnnnnnnnnnnnnnnnnnnnnnnnnnnnnnnnnnnnnnnnnnnnnnnnnnnnnnnnnnnnnnnnnnnnnnnnnnnnnnnnnnnnnnnnnnnnnnnnnnnnnnnnnnnnnnnnnnnnnnnnnnnnnnnnnnnnnnnnnnnnnnnnnnnnnnnnnnnnnnnnnnnnnnnnnnnnnnnnnnnnnnnnnnnnnnnnnnnnnnnnnnnnnnnnnnnnnnnnnnnnnnnnnnnnnnnnnnnnnnnnnnnnnnnnnnnnnnnnnnnnnnnnnnnnnnnnnnnnnnnnnnnnnnnnnnnnnnnnnnnnnnnnnnnnnnnnnnnnnnnnnnnnnnnnnnnnnnnnnnnnnnnnnnnnnnnnnnnnnnnnnnnnnnnnnnnnnnnnnnnnnnnnnnnnnnnnnnnnnnnnnnnnnnnnnnnnnnnnnnnnnnnnnnnnnnnnnnnnnnnnnnnnnnnnnnnnnnnnnnnnnnnnnnnnnnnnnnnnnnnnnnnnnnnnnnnnnnnnnnnnnnnnnnnnnnnnnnnnnnnnnnnnnnnnnnnnnnnnnnnnnnnnnnnnnnnnnnnnnnnnnnnnnnnnnnnnnnnnnnnnnnnnnnnnnnnnnnnnnnnnnnnnnnnnnnnnnnnnnnnnnnnnnnnnnnnnnnnnnnnnnnnnnnnnnnnnnnnnnnnnnnnnnnnnnnnnnnnnnnnnnnnnnnnnnnnnnnnnnnnnnnnnnnnnnnnnnnnnnnnnnnnnnnnnnnnnnnnnnnnnnnnnnnnnnnnnnnnnnnnnnnnnnnnnnnnnnnnnnnnnnnnnnnnnnnnnnnnnnnnnnnnnnnnnnnnnnnnnnnnnnnnnnnnnnnnnnnnnnnnnnnnnnnnnnnnnnnnnnnnnnnnnnnnnnnnnnnnnnnnnnnnnnnnnnnnnnnnnnnnnnnnnnnnnnnnnnnnnnnnnnnnnnnnnnnnnnnnnnnnnnnnnnnnnnnnnnnnnnnnnnnnnnnnnnnnnnnnnnnnnnnnnnnnnnnnnnnnnnnnnnnnnnnnnnnnnnnnnnnnnnnnnnnnnnnnnnnnnnnnnnnnnnnnnnnnnnnnnnnnnnnnnnnnnnnnnnnnnnnnnnnnnnnnnnnnnnnnnnnnnnnnnnnnnnnnnnnnnnnnnnnnnnnnnnnnnnnnnnnnnnnnnnnnnnnnnnnnnnnnnnnnnnnnnnnnnnnnnnnnnnnnnnnnnnnnnnnnnnnnnnnnnnnnnnnnnnnnnnnnnnnnnnnnnnnnnnnnnnnnnnnnnnnnnnnnnnnnnnnnnnnnnnnnnnnnnnnnnnnnnnnnnnnnnnnnnnnnnnnnnnnnnnnnnnnnnnnnnnnnnnnnnnnnnnnnnnnnnnnnnnnnnnnnnnnnnnnnnnnnnnnnnnnnnnnnnnnnnnnnnnnnnnnnnnnnnnnnnnnnnnnnnnnnnnnnnnnnnnnnnnnnnnnnnnnnnnnnnnnnnnnnnnnnnnnnnnnnnnnnnnnnnnnnnnnnnnnnnnnnnnnnnnnnnnnnnnnnnnnnnnnnnnnnnnnnnnnnnnnnnnnnnnnnnnnnnnnnnnnnnnnnnnnnnnnnnnnnnnnnnnnnnnnnnnnnnnnnnnnnnnnnnnnnnnnnnnnnnnnnnnnnnnnnnnnnnnnnnnnnnnnnnnnnnnnnnnnnnnnnnnnnnnnnnnnnnnnnnnnnnnnnnnnnnnnnnnnnnnnnnnnnnnnnnnnnnnnnnnnnnnnnnnnnnnnnnnnnnnnnnnnnnnnnnnnnnnnnnnnnnnnnnnnnnnnnnnnnnnnnnnnnnnnnnnnnnnnnnnnnnnnnnnnnnnnnnnnnnnnnnnnnnnnnnnnnnnnnnnnnnnnnnnnnnnnnnnnnnnnnnnnnnnnnnnnnnnnnnnnnnnnnnnnnnnnnnnnnnnnnnnnnnnnnnnnnnnnnnnnnnnnnnnnnnnnnnnnnnnnnnnnnnnnnnnnnnnnnnnnnnnnnnnnnnnnnnnnnnnnnnnnnnnnnnnnnnnnnnnnnnnnnnnnnnnnnnnnnnnnnnnnnnnnnnnnnnnnnnnnnnnnnnnnnnnnnnnnnnnnnnnnnnnnnnnnnnnnnnnnnnnnnnnnnnnnnnnnnnnnnnnnnnnnnnnnnnnnnnnnnnnnnnnnnnnnnnnnnnnnnnnnnnnnnnnnnnnnnnnnnnnnnnnnnnnnnnnnnnnnnnnnnnnnnnnnnnnnnnnnnnnnnnnnnnnnnnnnnnnnnnnnnnnnnnnnnnnnnnnnnnnnnnnnnnnnnnnnnnnnnnnnnnnnnnnnnnnnnnnnnnnnnnnnnnnnnnnnnnnnnnnnnnnnnnnnnnnnnnnnnnnnnnnnnnnnnnnnnnnnnnnnnnnnnnnnnnnnnnnnnnnnnnnnnnnnnnnnnnnnnnnnnnnnnnnnnnnnnnnnnnnnnnnnnnnnnnnnnnnnnnnnnnnnnnnnnnnnnnnnnnnnnnnnnnnnnnnnnnnnnnnnnnnnnnnnnnnnnnnnnnnnnnnnnnnnnnnnnnnnnnnnnnnnnnnnnnnnnnnnnnnnnnnnnnnnnnnnnnnnnnnnnnnnnnnnnnnnnnnnnnnnnnnnnnnnnnnnnnnnnnnnnnnnnnnnnnnnnnnnnnnnnnnnnnnnnnnnnnnnnnnnnnnnnnnnnnnnnnnnnnnnnnnnnnnnnnnnnnnnnnnnnnnnnnnnnnnnnnnnnnnnnnnnnnnnnnnnnnnnnnnnnnnnnnnnnnnnnnnnnnnnnnnnnnnnnnnnnnnnnnnnnnnnnnnnnnnnnnnnnnnnnnnnnnnnnnnnnnnnnnnnnnnnnnnnnnnnnnnnnnnnnnnnnnnnnnnnnnnnnnnnnnnnnnnnnnnnnnnnnnnnnnnnnnnnnnnnnnnnnnnnnnnnnnnnnnnnnnnnnnnnnnnnnnnnnnnnnnnnnnnnnnnnnnnnnnnnnnnnnnnnnnnnnnnnnnnnnnnnnnnnnnnnnnnnnnnnnnnnnnnnnnnnnnnnnnnnnnnnnnnnnnnnnnnnnnnnnnnnnnnnnnnnnnnnnnnnnnnnnnnnnnnnnnnnnnnnnnnnnnnnnnnnnnnnnnnnnnnnnnnnnnnnnnnnnnnnnnnnnnnnnnnnnnnnnnnnnnnnnnnnnnnnnnnnnnnnnnnnnnnnnnnnnnnnnnnnnnnnnnnnnnnnnnnnnnnnnnnnnnnnnnnnnnnnnnnnnnnnnnnnnnnnnnnnnnnnnnnnnnnnnnnnnnnnnnnnnnnnnnnnnnnnnnnnnnnnnnnnnnnnnnnnnnnnnnnnnnnnnnnnnnnnnnnnnnnnnnnnnnnnnnnnnnnnnnnnnnnnnnnnnnnnnnnnnnnnnnnnnnnnnnnnnnnnnnnnnnnnnnnnnnnnnnnnnnnnnnnnnnnnnnnnnnnnnnnnnnnnnnnnnnnnnnnnnnnnnnnnnnnnnnnnnnnnnnnnnnnnnnnnnnnnnnnnnnnnnnnnnnnnnnnnnnnnnnnnnnnnnnnnnnnnnnnnnnnnnnnnnnnnnnnnnnnnnnnnnnnnnnnnnnnnnnnnnnnnnnnnnnnnnnnnnnnnnnnnnnnnnnnnnnnnnnnnnnnnnnnnnnnnnnnnnnnnnnnnnnnnnnnnnnnnnnnnnnnnnnnnnnnnnnnnnnnnnnnnnnnnnnnnnnnnnnnnnnnnnnnnnnnnnnnnnnnnnnnnnnnnnnnnnnnnnnnnnnnnnnnnnnnnnnnnnnnnnnnnnnnnnnnnnnnnnnnnnnnnnnnnnnnnnnnnnnnnnnnnnnnnnnnnnnnnnnnnnnnnnnnnnnnnnnnnnnnnnnnnnnnnnnnnnnnnnnnnnnnnnnnnnnnnnnnnnnnnnnnnnnnnnnnnnnnnnnnnnnnnnnnnnnnnnnnnnnnnnnnnnnnnnnnnnnnnnnnnnnnnnnnnnnnnnnnnnnnnnnnnnnnnnnnnnnnnnnnnnnnnnnnnnnnnnnnnnnnnnnnnnnnnnnnnnnnnnnnnnnnnnnnnnnnnnnnnnnnnnnnnnnnnnnnnnnnnnnnnnnnnnnnnnnnnnnnnnnnnnnnnnnnnnnnnnnnnnnnnnnnnnnnnnnnnnnnnnnnnnnnnnnnnnnnnnnnnnnnnnnnnnnnnnnnnnnnnnnnnnnnnnnnnnnnnnnnnnnnnnnnnnnnnnnnnnnnnnnnnnnnnnnnnnnnnnnnnnnnnnnnnnnnnnnnnnnnnnnnnnnnnnnnnnnnnnnnnnnnnnnnnnnnnnnnnnnnnnnnnnnnnnnnnnnnnnnnnnnnnnnnnnnnnnnnnnnnnnnnnnnnnnnnnnnnnnnnnnnnnnnnnnnnnnnnnnnnnnnnnnnnnnnnnnnnnnnnnnnnnnnnnnnnnnnnnnnnnnnnnnnnnnnnnnnnnnnnnnnnnnnnnnnnnnnnnnnnnnnnnnnnnnnnnnnnnnnnnnnnnnnnnnnnnnnnnnnnnnnnnnnnnnnnnnnnnnnnnnnnnnnnnnnnnnnnnnnnnnnnnnnnnnnnnnnnnnnnnnnnnnnnnnnnnnnnnnnnnnnnnnnnnnnnnnnnnnnnnnnnnnnnnnnnnnnnnnnnnnnnnnnnnnnnnnnnnnnnnnnnnnnnnnnnnnnnnnnnnnnnnnnnnnnnnnnnnnnnnnnnnnnnnnnnnnnnnnnnnnnnnnnnnnnnnnnnnnnnnnnnnnnnnnnnnnnnnnnnnnnnnnnnnnnnnnnnnnnnnnnnnnnnnnnnnnnnnnnnnnnnnnnnnnnnnnnnnnnnnnnnnnnnnnnnnnnnnnnnnnnnnnnnnnnnnnnnnnnnnnnnnnnnnnnnnnnnnnnnnnnnnnnnnnnnnnnnnnnnnnnnnnnnnnnnnnnnnnnnnnnnnnnnnnnnnnnnnnnnnnnnnnnnnnnnnnnnnnnnnnnnnnnnnnnnnnnnnnnnnnnnnnnnnnnnnnnnnnnnnnnnnnnnnnnnnnnnnnnnnnnnnnnnnnnnnnnnnnnnnnnnnnnnnnnnnnnnnnnnnnnnnnnnnnnnnnnnnnnnnnnnnnnnnnnnnnnnnnnnnnnnnnnnnnnnnnnnnnnnnnnnnnnnnnnnnnnnnnnnnnnnnnnnnnnnnnnnnnnnnnnnnnnnnnnnnnnnnnnnnnnnnnnnnnnnnnnnnnnnnnnnnnnnnnnnnnnnnnnnnnnnnnnnnnnnnnnnnnnnnnnnnnnnnnnnnnnnnnnnnnnnnnnnnnnnnnnnnnnnnnnnnnnnnnnnnnnnnnnnnnnnnnnnnnnnnnnnnnnnnnnnnnnnnnnnnnnnnnnnnnnnnnnnnnnnnnnnnnnnnnnnnnnnnnnnnnnnnnnnnnnnnnnnnnnnnnnnnnnnnnnnnnnnnnnnnnnnnnnnnnnnnnnnnnnnnnnnnnnnnnnnnnnnnnnnnnnnnnnnnnnnnnnnnnnnnnnnnnnnnnnnnnnnnnnnnnnnnnnnnnnnnnnnnnnnnnnnnnnnnnnnnnnnnnnnnnnnnnnnnnnnnnnnnnnnnnnnnnnnnnnnnnnnnnnnnnnnnnnnnnnnnnnnnnnnnnnnnnnnnnnnnnnnnnnnnnnnnnnnnnnnnnnnnnnnnnnnnnnnnnnnnnnnnnnnnnnnnnnnnnnnnnnnnnnnnnnnnnnnnnnnnnnnnnnnnnnnnnnnnnnnnnnnnnnnnnnnnnnnnnnnnnnnnnnnnnnnnnnnnnnnnnnnnnnnnnnnnnnnnnnnnnnnnnnnnnnnnnnnnnnnnnnnnnnnnnnnnnnnnnnnnnnnnnnnnnnnnnnnnnnnnnnnnnnnnnnnnnnnnnnnnnnnnnnnnnnnnnnnnnnnnnnnnnnnnnnnnnnnnnnnnnnnnnnnnnnnnnnnnnnnnnnnnnnnnnnnnnnnnnnnnnnnnnnnnnnnnnnnnnnnnnnnnnnnnnnnnnnnnnnnnnnnnnnnnnnnnnnnnnnnnnnnnnnnnnnnnnnnnnnnnnnnnnnnnnnnnnnnnnnnnnnnnnnnnnnnnnnnnnnnnnnnnnnnnnnnnnnnnnnnnnnnnnnnnnnnnnnnnnnnnnnnnnnnnnnnnnnnnnnnnnnnnnnnnnnnnnnnnnnnnnnnnnnnnnnnnnnnnnnnnnnnnnnnnnnnnnnnnnnnnnnnnnnnnnnnnnnnnnnnnnnnnnnnnnnnnnnnnnnnnnnnnnnnnnnnnnnnnnnnnnnnnnnnnnnnnnnnnnnnnnnnnnnnnnnnnnnnnnnnnnnnnnnnnnnnnnnnnnnnnnnnnnnnnnnnnnnnnnnnnnnnnnnnnnnnnnnnnnnnnnnnnnnnnnnnnnnnnnnnnnnnnnnnnnnnnnnnnnnnnnnnnnnnnnnnnnnnnnnnnnnnnnnnnnnnnnnnnnnnnnnnnnnnnnnnnnnnnnnnnnnnnnnnnnnnnnnnnnnnnnnnnnnnnnnnnnnnnnnnnnnnnnnnnnnnnnnnnnnnnnnnnnnnnnnnnnnnnnnnnnnnnnnnnnnnnnnnnnnnnnnnnnnnnnnnnnnnnnnnnnnnnnnnnnnnnnnnnnnnnnnnnnnnnnnnnnnnnnnnnnnnnnnnnnnnnnnnnnnnnnnnnnnnnnnnnnnnnnnnnnnnnnnnnnnnnnnnnnnnnnnnnnnnnnnnnnnnnnnnnnnnnnnnnnnnnnnnnnnnnnnnnnnnnnnnnnnnnnnnnnnnnnnnnnnnnnnnnnnnnnnnnnnnnnnnnnnnnnnnnnnnnnnnnnnnnnnnnnnnnnnnnnnnnnnnnnnnnnnnnnnnnnnnnnnnnnnnnnnnnnnnnnnnnnnnnnnnnnnnnnnnnnnnnnnnnnnnnnnnnnnnnnnnnnnnnnnnnnnnnnnnnnnnnnnnnnnnnnnnnnnnnnnnnnnnnnnnnnnnnnnnnnnnnnnnnnnnnnnnnnnnnnnnnnnnnnnnnnnnnnnnnnnnnnnnnnnnnnnnnnnnnnnnnnnnnnnnnnnnnnnnnnnnnnnnnnnnnnnnnnnnnnnnnnnnnnnnnnnnnnnnnnnnnnnnnnnnnnnnnnnnnnnnnnnnnnnnnnnnnnnnnnnnnnnnnnnnnnnnnnnnnnnnnnnnnnnnnnnnnnnnnnnnnnnnnnnnnnnnnnnnnnnnnnnnnnnnnnnnnnnnnnnnnnnnnnnnnnnnnnnnnnnnnnnnnnnnnnnnnnnnnnnnnnnnnnnnnnnnnnnnnnnnnnnnnnnnnnnnnnnnnnnnnnnnnnnnnnnnnnnnnnnnnnnnnnnnnnnnnnnnnnnnnnnnnnnnnnnnnnnnnnnnnnnnnnnnnnnnnnnnnnnnnnnnnnnnnnnnnnnnnnnnnnnnnnnnnnnnnnnnnnnnnnnnnnnnnnnnnnnnnnnnnnnnnnnnnnnnnnnnnnnnnnnnnnnnnnnnnnnnnnnnnnnnnnnnnnnnnnnnnnnnnnnnnnnnnnnnnnnnnnnnnnnnnnnnnnnnnnnnnnnnnnnnnnnnnnnnnnnnnnnnnnnnnnnnnnnnnnnnnnnnnnnnnnnnnnnnnnnnnnnnnnnnnnnnnnnnnnnnnnnnnnnnnnnnnnnnnnnnnnnnnnnnnnnnnnnnnnnnnnnnnnnnnnnnnnnnnnnnnnnnnnnnnnnnnnnnnnnnnnnnnnnnnnnnnnnnnnnnnnnnnnnnnnnnnnnnnnnnnnnnnnnnnnnnnnnnnnnnnnnnnnnnnnnnnnnnnnnnnnnnnnnnnnnnnnnnnnnnnnnnnnnnnnnnnnnnnnnnnnnnnnnnnnnnnnnnnnnnnnnnnnnnnnnnnnnnnnnnnnnnnnnnnnnnnnnnnnnnnnnnnnnnnnnnnnnnnnnnnnnnnnnnnnnnnnnnnnnnnnnnnnnnnnnnnnnnnnnnnnnnnnnnnnnnnnnnnnnnnnnnnnnnnnnnnnnnnnnnnnnnnnnnnnnnnnnnnnnnnnnnnnnnnnnnnnnnnnnnnnnnnnnnnnnnnnnnnnnnnnnnnnnnnnnnnnnnnnnnnnnnnnnnnnnnnnnnnnnnnnnnnnnnnnnnnnnnnnnnnnnnnnnnnnnnnnnnnnnnnnnnnnnnnnnnnnnnnnnnnnnnnnnnnnnnnnnnnnnnnnnnnnnnnnnnnnnnnnnnnnnnnnnnnnnnnnnnnnnnnnnnnnnnnnnnnnnnnnnnnnnnnnnnnnnnnnnnnnnnnnnnnnnnnnnnnnnnnnnnnnnnnnnnnnnnnnnnnnnnnnnnnnnnnnnnnnnnnnnnnnnnnnnnnnnnnnnnnnnnnnnnnnnnnnnnnnnnnnnnnnnnnnnnnnnnnnnnnnnnnnnnnnnnnnnnnnnnnnnnnnnnnnnnnnnnnnnnnnnnnnnnnnnnnnnnnnnnnnnnnnnnnnnnnnnnnnnnnnnnnnnnnnnnnnnnnnnnnnnnnnnnnnnnnnnnnnnnnnnnnnnnnnnnnnnnnnnnnnnnnnnnnnnnnnnnnnnnnnnnnnnnnnnnnnnnnnnnnnnnnnnnnnnnnnnnnnnnnnnnnnnnnnnnnnnnnnnnnnnnnnnnnnnnnnnnnnnnnnnnnnnnnnnnnnnnnnnnnnnnnnnnnnnnnnnnnnnnnnnnnnnnnnnnnnnnnnnnnnnnnnnnnnnnnnnnnnnnnnnnnnnnnnnnnnnnnnnnnnnnnnnnnnnnnnnnnnnnnnnnnnnnnnnnnnnnnnnnnnnnnnnnnnnnnnnnnnnnnnnnnnnnnnnnnnnnnnnnnnnnnnnnnnnnnnnnnnnnnnnnnnnnnnnnnnnnnnnnnnnnnnnnnnnnnnnnnnnnnnnnnnnnnnnnnnnnnnnnnnnnnnnnnnnnnnnnnnnnnnnnnnnnnnnnnnnnnnnnnnnnnnnnnnnnnnnnnnnnnnnnnnnnnnnnnnnnnnnnnnnnnnnnnnnnnnnnnnnnnnnnnnnnnnnnnnnnnnnnnnnnnnnnnnnnnnnnnnnnnnnnnnnnnnnnnnnnnnnnnnnnnnnnnnnnnnnnnnnnnnnnnnnnnnnnnnnnnnnnnnnnnnnnnnnnnnnnnnnnnnnnnnnnnnnnnnnnnnnnnnnnnnnnnnnnnnnnnnnnnnnnnnnnnnnnnnnnnnnnnnnnnnnnnnnnnnnnnnnnnnnnnnnnnnnnnnnnnnnnnnnnnnnnnnnnnnnnnnnnnnnnnnnnnnnnnnnnnnnnnnnnnnnnnnnnnnnnnnnnnnnnnnnnnnnnnnnnnnnnnnnnnnnnnnnnnnnnnnnnnnnnnnnnnnnnnnnnnnnnnnnnnnnnnnnnnnnnnnnnnnnnnnnnnnnnnnnnnnnnnnnnnnnnnnnnnnnnnnnnnnnnnnnnnnnnnnnnnnnnnnnnnnnnnnnnnnnnnnnnnnnnnnnnnnnnnnnnnnnnnnnnnnnnnnnnnnnnnnnnnnnnnnnnnnnnnnnnnnnnnnnnnnnnnnnnnnnnnnnnnnnnnnnnnnnnnnnnnnnnnnnnnnnnnnnnnnnnnnnnnnnnnnnnnnnnnnnnnnnnnnnnnnnnnnnnnnnnnnnnnnnnnnnnnnnnnnnnnnnnnnnnnnnnnnnnnnnnnnnnnnnnnnnnnnnnnnnnnnnnnnnnnnnnnnnnnnnnnnnnnnnnnnnnnnnnnnnnnnnnnnnnnnnnnnnnnnnnnnnnnnnnnnnnnnnnnnnnnnnnnnnnnnnnnnnnnnnnnnnnnnnnnnnnnnnnnnnnnnnnnnnnnnnnnnnnnnnnnnnnnnnnnnnnnnnnnnnnnnnnnnnnnnnnnnnnnnnnnnnnnnnnnnnnnnnnnnnnnnnnnnnnnnnnnnnnnnnnnnnnnnnnnnnnnnnnnnnnnnnnnnnnnnnnnnnnnnnnnnnnnnnnnnnnnnnnnnnnnnnnnnnnnnnnnnnnnnnnnnnnnnnnnnnnnnnnnnnnnnnnnnnnnnnnnnnnnnnnnnnnnnnnnnnnnnnnnnnnnnnnnnnnnnnnnnnnnnnnnnnnnnnnnnnnnnnnnnnnnnnnnnnnnnnnnnnnnnnnnnnnnnnnnnnnnnnnnnnnnnnnnnnnnnnnnnnnnnnnnnnnnnnnnnnnnnnnnnnnnnnnnnnnnnnnnnnnnnnnnnnnnnnnnnnnnnnnnnnnnnnnnnnnnnnnnnnnnnnnnnnnnnnnnnnnnnnnnnnnnnnnnnnnnnnnnnnnnnnnnnnnnnnnnnnnnnnnnnnnnnnnnnnnnnnnnnnnnnnnnnnnnnnnnnnnnnnnnnnnnnnnnnnnnnnnnnnnnnnnnnnnnnnnnnnnnnnnnnnnnnnnnnnnnnnnnnnnnnnnnnnnnnnnnnnnnnnnnnnnnnnnnnnnnnnnnnnnnnnnnnnnnnnnnnnnnnnnnnnnnnnnnnnnnnnnnnnnnnnnnnnnnnnnnnnnnnnnnnnnnnnnnnnnnnnnnnnnnnnnnnnnnnnnnnnnnnnnnnnnnnnnnnnnnnnnnnnnnnnnnnnnnnnnnnnnnnnnnnnnnnnnnnnnnnnnnnnnnnnnnnnnnnnnnnnnnnnnnnnnnnnnnnnnnnnnnnnnnnnnnnnnnnnnnnnnnnnnnnnnnnnnnnnnnnnnnnnnnnnnnnnnnnnnnnnnnnnnnnnnnnnnnnnnnnnnnnnnnnnnnnnnnnnnnnnnnnnnnnnnnnnnnnnnnnnnnnnnnnnnnnnnnnnnnnnnnnnnnnnnnnnnnnnnnnnnnnnnnnnnnnnnnnnnnnnnnnnnnnnnnnnnnnnnnnnnnnnnnnnnnnnnnnnnnnnnnnnnnnnnnnnnnnnnnnnnnnnnnnnnnnnnnnnnnnnnnnnnnnnnnnnnnnnnnnnnnnnnnnnnnnnnnnnnnnnnnnnnnnnnnnnnnnnnnnnnnnnnnnnnnnnnnnnnnnnnnnnnnnnnnnnnnnnnnnnnnnnnnnnnnnnnnnnnnnnnnnnnnnnnnnnnnnnnnnnnnnnnnnnnnnnnnnnnnnnnnnnnnnnnnnnnnnnnnnnnnnnnnnnnnnnnnnnnnnnnnnnnnnnnnnnnnnnnnnnnnnnnnnnnnnnnnnnnnnnnnnnnnnnnnnnnnnnnnnnnnnnnnnnnnnnnnnnnnnnnnnnnnnnnnnnnnnnnnnnnnnnnnnnnnnnnnnnnnnnnnnnnnnnnnnnnnnnnnnnnnnnnnnnnnnnnnnnnnnnnnnnnnnnnnnnnnnnnnnnnnnnnnnnnnnnnnnnnnnnnnnnnnnnnnnnnnnnnnnnnnnnnnnnnnnnnnnnnnnnnnnnnnnnnnnnnnnnnnnnnnnnnnnnnnnnnnnnnnnnnnnnnnnnnnnnnnnnnnnnnnnnnnnnnnnnnnnnnnnnnnnnnnnnnnnnnnnnnnnnnnnnnnnnnnnnnnnnnnnnnnnnnnnnnnnnnnnnnnnnnnnnnnnnnnnnnnnnnnnnnnnnnnnnnnnnnnnnnnnnnnnnnnnnnnnnnnnnnnnnnnnnnnnnnnnnnnnnnnnnnnnnnnnnnnnnnnnnnnnnnnnnnnnnnnnnnnnnnnnnnnnnnnnnnnnnnnnnnnnnnnnnnnnnnnnnnnnnnnnnnnnnnnnnnnnnnnnnnnnnnnnnnnnnnnnnnnnnnnnnnnnnnnnnnnnnnnnnnnnnnnnnnnnnnnnnnnnnnnnnnnnnnnnnnnnnnnnnnnnnnnnnnnnnnnnnnnnnnnnnnnnnnnnnnnnnnnnnnnnnnnnnnnnnnnnnnnnnnnnnnnnnnnnnnnnnnnnnnnnnnnnnnnnnnnnnnnnnnnnnnnnnnnnnnnnnnnnnnnnnnnnnnnnnnnnnnnnnnnnnnnnnnnnnnnnnnnnnnnnnnnnnnnnnnnnnnnnnnnnnnnnnnnnnnnnnnnnnnnnnnnnnnnnnnnnnnnnnnnnnnnnnnnnnnnnnnnnnnnnnnnnnnnnnnnnnnnnnnnnnnnnnnnnnnnnnnnnnnnnnnnnnnnnnnnnnnnnnnnnnnnnnnnnnnnnnnnnnnnnnnnnnnnnnnnnnnnnnnnnnnnnnnnnnnnnnnnnnnnnnnnnnnnnnnnnnnnnnnnnnnnnnnnnnnnnnnnnnnnnnnnnnnnnnnnnnnnnnnnnnnnnnnnnnnnnnnnnnnnnnnnnnnnnnnnnnnnnnnnnnnnnnnnnnnnnnnnnnnnnnnnnnnnnnnnnnnnnnnnnnnnnnnnnnnnnnnnnnnnnnnnnnnnnnnnnnnnnnnnnnnnnnnnnnnnnnnnnnnnnnnnnnnnnnnnnnnnnnnnnnnnnnnnnnnnnnnnnnnnnnnnnnnnnnnnnnnnnnnnnnnnnnnnnnnnnnnnnnnnnnnnnnnnnnnnnnnnnnnnnnnnnnnnnnnnnnnnnnnnnnnnnnnnnnnnnnnnnnnnnnnnnnnnnnnnnnnnnnnnnnnnnnnnnnnnnnnnnnnnnnnnnnnnnnnnnnnnnnnnnnnnnnnnnnnnnnnnnnnnnnnnnnnnnnnnnnnnnnnnnnnnnnnnnnnnnnnnnnnnnnnnnnnnnnnnnnnnnnnnnnnnnnnnnnnnnnnnnnnnnnnnnnnnnnnnnnnnnnnnnnnnnnnnnnnnnnnnnnnnnnnnnnnnnnnnnnnnnnnnnnnnnnnnnnnnnnnnnnnnnnnnnnnnnnnnnnnnnnnnnnnnnnnnnnnnnnnnnnnnnnnnnnnnnnnnnnnnnnnnnnnnnnnnnnnnnnnnnnnnnnnnnnnnnnnnnnnnnnnnnnnnnnnnnnnnnnnnnnnnnnnnnnnnnnnnnnnnnnnnnnnnnnnnnnnnnnnnnnnnnnnnnnnnnnnnnnnnnnnnnnnnnnnnnnnnnnnnnnnnnnnnnnnnnnnnnnnnnnnnnnnnnnnnnnnnnnnnnnnnnnnnnnnnnnnnnnnnnnnnnnnnnnnnnnnnnnnnnnnnnnnnnnnnnnnnnnnnnnnnnnnnnnnnnnnnnnnnnnnnnnnnnnnnnnnnnnnnnnnnnnnnnnnnnnnnnnnnnnnnnnnnnnnnnnnnnnnnnnnnnnnnnnnnnnnnnnnnnnnnnnnnnnnnnnnnnnnnnnnnnnnnnnnnnnnnnnnnnnnnnnnnnnnnnnnnnnnnnnnnnnnnnnnnnnnnnnnnnnnnnnnnnnnnnnnnnnnnnnnnnnnnnnnnnnnnnnnnnnnnnnnnnnnnnnnnnnnnnnnnnnnnnnnnnnnnnnnnnnnnnnnnnnnnnnnnnnnnnnnnnnnnnnnnnnnnnnnnnnnnnnnnnnnnnnnnnnnnnnnnnnnnnnnnnnnnnnnnnnnnnnnnnnnnnnnnnnnnnnnnnnnnnnnnnnnnnnnnnnnnnnnnnnnnnnnnnnnnnnnnnnnnnnnnnnnnnnnnnnnnnnnnnnnnnnnnnnnnnnnnnnnnnnnnnnnnnnnnnnnnnnnnnnnnnnnnnnnnnnnnnnnnnnnnnnnnnnnnnnnnnnnnnnnnnnnnnnnnnnnnnnnnnnnnnnnnnnnnnnnnnnnnnnnnnnnnnnnnnnnnnnnnnnnnnnnnnnnnnnnnnnnnnnnnnnnnnnnnnnnnnnnnnnnnnnnnnnnnnnnnnnnnnnnnnnnnnnnnnnnnnnnnnnnnnnnnnnnnnnnnnnnnnnnnnnnnnnnnnnnnnnnnnnnnnnnnnnnnnnnnnnnnnnnnnnnnnnnnnnnnnnnnnnnnnnnnnnnnnnnnnnnnnnnnnnnnnnnnnnnnnnnnnnnnnnnnnnnnnnnnnnnnnnnnnnnnnnnnnnnnnnnnnnnnnnnnnnnnnnnnnnnnnnnnnnnnnnnnnnnnnnnnnnnnnnnnnnnnnnnnnnnnnnnnnnnnnnnnnnnnnnnnnnnnnnnnnnnnnnnnnnnnnnnnnnnnnnnnnnnnnnnnnnnnnnnnnnnnnnnnnnnnnnnnnnnnnnnnnnnnnnnnnnnnnnnnnnnnnnnnnnnnnnnnnnnnnnnnnnnnnnnnnnnnnnnnnnnnnnnnnnnnnnnnnnnnnnnnnnnnnnnnnnnnnnnnnnnnnnnnnnnnnnnnnnnnnnnnnnnnnnnnnnnnnnnnnnnnnnnnnnnnnnnnnnnnnnnnnnnnnnnnnnnnnnnnnnnnnnnnnnnnnnnnnnnnnnnnnnnnnnnnnnnnnnnnnnnnnnnnnnnnnnnnnnnnnnnnnnnnnnnnnnnnnnnnnnnnnnnnnnnnnnnnnnnnnnnnnnnnnnnnnnnnnnnnnnnnnnnnnnnnnnnnnnnnnnnnnnnnnnnnnnnnnnnnnnnnnnnnnnnnnnnnnnnnnnnnnnnnnnnnnnnnnnnnnnnnnnnnnnnnnnnnnnnnnnnnnnnnnnnnnnnnnnnnnnnnnnnnnnnnnnnnnnnnnnnnnnnnnnnnnnnnnnnnnnnnnnnnnnnnnnnnnnnnnnnnnnnnnnnnnnnnnnnnnnnnnnnnnnnnnnnnnnnnnnnnnnnnnnnnnnnnnnnnnnnnnnnnnnnnnnnnnnnnnnnnnnnnnnnnnnnnnnnnnnnnnnnnnnnnnnnnnnnnnnnnnnnnnnnnnnnnnnnnnnnnnnnnnnnnnnnnnnnnnnnnnnnnnnnnnnnnnnnnnnnnnnnnnnnnnnnnnnnnnnnnnnnnnnnnnnnnnnnnnnnnnnnnnnnnnnnnnnnnnnnnnnnnnnnnnnnnnnnnnnnnnnnnnnnnnnnnnnnnnnnnnnnnnnnnnnnnnnnnnnnnnnnnnnnnnnnnnnnnnnnnnnnnnnnnnnnnnnnnnnnnnnnnnnnnnnnnnnnnnnnnnnnnnnnnnnnnnnnnnnnnnnnnnnnnnnnnnnnnnnnnnnnnnnnnnnnnnnnnnnnnnnnnnnnnnnnnnnnnnnnnnnnnnnnnnnnnnnnnnnnnnnnnnnnnnnnnnnnnnnnnnnnnnnnnnnnnnnnnnnnnnnnnnnnnnnnnnnnnnnnnnnnnnnnnnnnnnnnnnnnnnnnnnnnnnnnnnnnnnnnnnnnnnnnnnnnnnnnnnnnnnnnnnnnnnnnnnnnnnnnnnnnnnnnnnnnnnnnnnnnnnnnnnnnnnnnnnnnnnnnnnnnnnnnnnnnnnnnnnnnnnnnnnnnnnnnnnnnnnnnnnnnnnnnnnnnnnnnnnnnnnnnnnnnnnnnnnnnnnnnnnnnnnnnnnnnnnnnnnnnnnnnnnnnnnnnnnnnnnnnnnnnnnnnnnnnnnnnnnnnnnnnnnnnnnnnnnnnnnnnnnnnnnnnnnnnnnnnnnnnnnnnnnnnnnnnnnnnnnnnnnnnnnnnnnnnnnnnnnnnnnnnnnnnnnnnnnnnnnnnnnnnnnnnnnnnnnnnnnnnnnnnnnnnnnnnnnnnnnnnnnnnnnnnnnnnnnnnnnnnnnnnnnnnnnnnnnnnnnnnnnnnnnnnnnnnnnnnnnnnnnnnnnnnnnnnnnnnnnnnnnnnnnnnnnnnnnnnnnnnnnnnnnnnnnnnnnnnnnnnnnnnnnnnnnnnnnnnnnnnnnnnnnnnnnnnnnnnnnnnnnnnnnnnnnnnnnnnnnnnnnnnnnnnnnnnnnnnnnnnnnnnnnnnnnnnnnnnnnnnnnnnnnnnnnnnnnnnnnnnnnnnnnnnnnnnnnnnnnnnnnnnnnnnnnnnnnnnnnnnnnnnnnnnnnnnnnnnnnnnnnnnnnnnnnnnnnnnnnnnnnnnnnnnnnnnnnnnnnnnnnnnnnnnnnnnnnnnnnnnnnnnnnnnnnnnnnnnnnnnnnnnnnnnnnnnnnnnnnnnnnnnnnnnnnnnnnnnnnnnnnnnnnnnnnnnnnnnnnnnnnnnnnnnnnnnnnnnnnnnnnnnnnnnnnnnnnnnnnnnnnnnnnnnnnnnnnnnnnnnnnnnnnnnnnnnnnnnnnnnnnnnnnnnnnnnnnnnnnnnnnnnnnnnnnnnnnnnnnnnnnnnnnnnnnnnnnnnnnnnnnnnnnnnnnnnnnnnnnnnnnnnnnnnnnnnnnnnnnnnnnnnnnnnnnnnnnnnnnnnnnnnnnnnnnnnnnnnnnnnnnnnnnnnnnnnnnnnnnnnnnnnnnnnnnnnnnnnnnnnnnnnnnnnnnnnnnnnnnnnnnnnnnnnnnnnnnnnnnnnnnnnnnnnnnnnnnnnnnnnnnnnnnnnnnnnnnnnnnnnnnnnnnnnnnnnnnnnnnnnnnnnnnnnnnnnnnnnnnnnnnnnnnnnnnnnnnnnnnnnnnnnnnnnnnnnnnnnnnnnnnnnnnnnnnnnnnnnnnnnnnnnnnnnnnnnnnnnnnnnnnnnnnnnnnnnnnnnnnnnnnnnnnnnnnnnnnnnnnnnnnnnnnnnnnnnnnnnnnnnnnnnnnnnnnnnnnnnnnnnnnnnnnnnnnnnnnnnnnnnnnnnnnnnnnnnnnnnnnnnnnnnnnnnnnnnnnnnnnnnnnnnnnnnnnnnnnnnnnnnnnnnnnnnnnnnnnnnnnnnnnnnnnnnnnnnnnnnnnnnnnnnnnnnnnnnnnnnnnnnnnnnnnnnnnnnnnnnnnnnnnnnnnnnnnnnnnnnnnnnnnnnnnnnnnnnnnnnnnnnnnnnnnnnnnnnnnnnnnnnnnnnnnnnnnnnnnnnnnnnnnnnnnnnnnnnnnnnnnnnnnnnnnnnnnnnnnnnnnnnnnnnnnnnnnnnnnnnnnnnnnnnnnnnnnnnnnnnnnnnnnnnnnnnnnnnnnnnnnnnnnnnnnnnnnnnnnnnnnnnnnnnnnnnnnnnnnnnnnnnnnnnnnnnnnnnnnnnnnnnnnnnnnnnnnnnnnnnnnnnnnnnnnnnnnnnnnnnnnnnnnnnnnnnnnnnnnnnnnnnnnnnnnnnnnnnnnnnnnnnnnnnnnnnnnnnnnnnnnnnnnnnnnnnnnnnnnnnnnnnnnnnnnnnnnnnnnnnnnnnnnnnnnnnnnnnnnnnnnnnnnnnnnnnnnnnnnnnnnnnnnnnnnnnnnnnnnnnnnnnnnnnnnnnnnnnnnnnnnnnnnnnnnnnnnnnnnnnnnnnnnnnnnnnnnnnnnnnnnnnnnnnnnnnnnnnnnnnnnnnnnnnnnnnnnnnnnnnnnnnnnnnnnnnnnnnnnnnnnnnnnnnnnnnnnnnnnnnnnnnnnnnnnnnnnnnnnnnnnnnnnnnnnnnnnnnnnnnnnnnnnnnnnnnnnnnnnnnnnnnnnnnnnnnnnnnnnnnnnnnnnnnnnnnnnnnnnnnnnnnnnnnnnnnnnnnnnnnnnnnnnnnnnnnnnnnnnnnnnnnnnnnnnnnnnnnnnnnnnnnnnnnnnnnnnnnnnnnnnnnnnnnnnnnnnnnnnnnnnnnnnnnnnnnnnnnnnnnnnnnnnnnnnnnnnnnnnnnnnnnnnnnnnnnnnnnnnnnnnnnnnnnnnnnnnnnnnnnnnnnnnnnnnnnnnnnnnnnnnnnnnnnnnnnnnnnnnnnnnnnnnnnnnnnnnnnnnnnnnnnnnnnnnnnnnnnnnnnnnnnnnnnnnnnnnnnnnnnnnnnnnnnnnnnnnnnnnnnnnnnnnnnnnnnnnnnnnnnnnnnnnnnnnnnnnnnnnnnnnnnnnnnnnnnnnnnnnnnnnnnnnnnnnnnnnnnnnnnnnnnnnnnnnnnnnnnnnnnnnnnnnnnnnnnnnnnnnnnnnnnnnnnnnnnnnnnnnnnnnnnnnnnnnnnnnnnnnnnnnnnnnnnnnnnnnnnnnnnnnnnnnnnnnnnnnnnnnnnnnnnnnnnnnnnnnnnnnnnnnnnnnnnnnnnnnnnnnnnnnnnnnnnnnnnnnnnnnnnnnnnnnnnnnnnnnnnnnnnnnnnnnnnnnnnnnnnnnnnnnnnnnnnnnnnnnnnnnnnnnnnnnnnnnnnnnnnnnnnnnnnnnnnnnnnnnnnnnnnnnnnnnnnnnnnnnnnnnnnnnnnnnnnnnnnnnnnnnnnnnnnnnnnnnnnnnnnnnnnnnnnnnnnnnnnnnnnnnnnnnnnnnnnnnnnnnnnnnnnnnnnnnnnnnnnnnnnnnnnnnnnnnnnnnnnnnnnnnnnnnnnnnnnnnnnnnnnnnnnnnnnnnnnnnnnnnnnnnnnnnnnnnnnnnnnnnnnnnnnnnnnnnnnnnnnnnnnnnnnnnnnnnnnnnnnnnnnnnnnnnnnnnnnnnnnnnnnnnnnnnnnnnnnnnnnnnnnnnnnnnnnnnnnnnnnnnnnnnnnnnnnnnnnnnnnnnnnnnnnnnnnnnnnnnnnnnnnnnnnnnnnnnnnnnnnnnnnnnnnnnnnnnnnnnnnnnnnnnnnnnnnnnnnnnnnnnnnnnnnnnnnnnnnnnnnnnnnnnnnnnnnnnnnnnnnnnnnnnnnnnnnnnnnnnnnnnnnnnnnnnnnnnnnnnnnnnnnnnnnnnnnnnnnnnnnnnnnnnnnnnnnnnnnnnnnnnnnnnnnnnnnnnnnnnnnnnnnnnnnnnnnnnnnnnnnnnnnnnnnnnnnnnnnnnnnnnnnnnnnnnnnnnnnnnnnnnnnnnnnnnnnnnnnnnnnnnnnnnnnnnnnnnnnnnnnnnnnnnnnnnnnnnnnnnnnnnnnnnnnnnnnnnnnnnnnnnnnnnnnnnnnnnnnnnnnnnnnnnnnnnnnnnnnnnnnnnnnnnnnnnnnnnnnnnnnnnnnnnnnnnnnnnnnnnnnnnnnnnnnnnnnnnnnnnnnnnnnnnnnnnnnnnnnnnnnnnnnnnnnnnnnnnnnnnnnnnnnnnnnnnnnnnnnnnnnnnnnnnnnnnnnnnnnnnnnnnnnnnnnnnnnnnnnnnnnnnnnnnnnnnnnnnnnnnnnnnnnnnnnnnnnnnnnnnnnnnnnnnnnnnnnnnnnnnnnnnnnnnnnnnnnnnnnnnnnnnnnnnnnnnnnnnnnnnnnnnnnnnnnnnnnnnnnnnnnnnnnnnnnnnnnnnnnnnnnnnnnnnnnnnnnnnnnnnnnnnnnnnnnnnnnnnnnnnnnnnnnnnnnnnnnnnnnnnnnnnnnnnnnnnnnnnnnnnnnnnnnnnnnnnnnnnnnnnnnnnnnnnnnnnnnnnnnnnnnnnnnnnnnnnnnnnnnnnnnnnnnnnnnnnnnnnnnnnnnnnnnnnnnnnnnnnnnnnnnnnnnnnnnnnnnnnnnnnnnnnnnnnnnnnnnnnnnnnnnnnnnnnnnnnnnnnnnnnnnnnnnnnnnnnnnnnnnnnnnnnnnnnnnnnnnnnnnnnnnnnnnnnnnnnnnnnnnnnnnnnnnnnnnnnnnnnnnnnnnnnnnnnnnnnnnnnnnnnnnnnnnnnnnnnnnnnnnnnnnnnnnnnnnnnnnnnnnnnnnnnnnnnnnnnnnnnnnnnnnnnnnnnnnnnnnnnnnnnnnnnnnnnnnnnnnnnnnnnnnnnnnnnnnnnnnnnnnnnnnnnnnnnnnnnnnnnnnnnnnnnnnnnnnnnnnnnnnnnnnnnnnnnnnnnnnnnnnnnnnnnnnnnnnnnnnnnnnnnnnnnnnnnnnnnnnnnnnnnnnnnnnnnnnnnnnnnnnnnnnnnnnnnnnnnnnnnnnnnnnnnnnnnnnnnnnnnnnnnnnnnnnnnnnnnnnnnnnnnnnnnnnnnnnnnnnnnnnnnnnnnnnnnnnnnnnnnnnnnnnnnnnnnnnnnnnnnnnnnnnnnnnnnnnnnnnnnnnnnnnnnnnnnnnnnnnnnnnnnnnnnnnnnnnnnnnnnnnnnnnnnnnnnnnnnnnnnnnnnnnnnnnnnnnnnnnnnnnnnnnnnnnnnnnnnnnnnnnnnnnnnnnnnnnnnnnnnnnnnnnnnnnnnnnnnnnnnnnnnnnnnnnnnnnnnnnnnnnnnnnnnnnnnnnnnnnnnnnnnnnnnnnnnnnnnnnnnnnnnnnnnnnnnnnnnnnnnnnnnnnnnnnnnnnnnnnnnnnnnnnnnnnnnnnnnnnnnnnnnnnnnnnnnnnnnnnnnnnnnnnnnnnnnnnnnnnnnnnnnnnnnnnnnnnnnnnnnnnnnnnnnnnnnnnnnnnnnnnnnnnnnnnnnnnnnnnnnnnnnnnnnnnnnnnnnnnnnnnnnnnnnnnnnnnnnnnnnnnnnnnnnnnnnnnnnnnnnnnnnnnnnnnnnnnnnnnnnnnnnnnnnnnnnnnnnnnnnnnnnnnnnnnnnnnnnnnnnnnnnnnnnnnnnnnnnnnnnnnnnnnnnnnnnnnnnnnnnnnnnnnnnnnnnnnnnnnnnnnnnnnnnnnnnnnnnnnnnnnnnnnnnnnnnnnnnnnnnnnnnnnnnnnnnnnnnnnnnnnnnnnnnnnnnnnnnnnnnnnnnnnnnnnnnnnnnnnnnnnnnnnnnnnnnnnnnnnnnnnnnnnnnnnnnnnnnnnnnnnnnnnnnnnnnnnnnnnnnnnnnnnnnnnnnnnnnnnnnnnnnnnnnnnnnnnnnnnnnnnnnnnnnnnnnnnnnnnnnnnnnnnnnnnnnnnnnnnnnnnnnnnnnnnnnnnnnnnnnnnnnnnnnnnnnnnnnnnnnnnnnnnnnnnnnnnnnnnnnnnnnnnnnnnnnnnnnnnnnnnnnnnnnnnnnnnnnnnnnnnnnnnnnnnnnnnnnnnnnnnnnnnnnnnnnnnnnnnnnnnnnnnnnnnnnnnnnnnnnnnnnnnnnnnnnnnnnnnnnnnnnnnnnnnnnnnnnnnnnnnnnnnnnnnnnnnnnnnnnnnnnnnnnnnnnnnnnnnnnnnnnnnnnnnnnnnnnnnnnnnnnnnnnnnnnnnnnnnnnnnnnnnnnnnnnnnnnnnnnnnnnnnnnnnnnnnnnnnnnnnnnnnnnnnnnnnnnnnnnnnnnnnnnnnnnnnnnnnnnnnnnnnnnnnnnnnnnnnnnnnnnnnnnnnnnnnnnnnnnnnnnnnnnnnnnnnnnnnnnnnnnnnnnnnnnnnnnnnnnnnnnnnnnnnnnnnnnnnnnnnnnnnnnnnnnnnnnnnnnnnnnnnnnnnnnnnnnnnnnnnnnnnnnnnnnnnnnnnnnnnnnnnnnnnnnnnnnnnnnnnnnnnnnnnnnnnnnnnnnnnnnnnnnnnnnnnnnnnnnnnnnnnnnnnnnnnnnnnnnnnnnnnnnnnnnnnnnnnnnnnnnnnnnnnnnnnnnnnnnnnnnnnnnnnnnnnnnnnnnnnnnnnnnnnnnnnnnnnnnnnnnnnnnnnnnnnnnnnnnnnnnnnnnnnnnnnnnnnnnnnnnnnnnnnnnnnnnnnnnnnnnnnnnnnnnnnnnnnnnnnnnnnnnnnnnnnnnnnnnnnnnnnnnnnnnnnnnnnnnnnnnnnnnnnnnnnnnnnnnnnnnnnnnnnnnnnnnnnnnnnnnnnnnnnnnnnnnnnnnnnnnnnnnnnnnnnnnnnnnnnnnnnnnnnnnnnnnnnnnnnnnnnnnnnnnnnnnnnnnnnnnnnnnnnnnnnnnnnnnnnnnnnnnnnnnnnnnnnnnnnnnnnnnnnnnnnnnnnnnnnnnnnnnnnnnnnnnnnnnnnnnnnnnnnnnnnnnnnnnnnnnnnnnnnnnnnnnnnnnnnnnnnnnnnnnnnnnnnnnnnnnnnnnnnnnnnnnnnnnnnnnnnnnnnnnnnnnnnnnnnnnnnnnnnnnnnnnnnnnnnnnnnnnnnnnnnnnnnnnnnnnnnnnnnnnnnnnnnnnnnnnnnnnnnnnnnnnnnnnnnnnnnnnnnnnnnnnnnnnnnnnnnnnnnnnnnnnnnnnnnnnnnnnnnnnnnnnnnnnnnnnnnnnnnnnnnnnnnnnnnnnnnnnnnnnnnnnnnnnnnnnnnnnnnnnnnnnnnnnnnnnnnnnnnnnnnnnnnnnnnnnnnnnnnnnnnnnnnnnnnnnnnnnnnnnnnnnnnnnnnnnnnnnnnnnnnnnnnnnnnnnnnnnnnnnnnnnnnnnnnnnnnnnnnnnnnnnnnnnnnnnnnnnnnnnnnnnnnnnnnnnnnnnnnnnnnnnnnnnnnnnnnnnnnnnnnnnnnnnnnnnnnnnnnnnnnnnnnnnnnnnnnnnnnnnnnnnnnnnnnnnnnnnnnnnnnnnnnnnnnnnnnnnnnnnnnnnnnnnnnnnnnnnnnnnnnnnnnnnnnnnnnnnnnnnnnnnnnnnnnnnnnnnnnnnnnnnnnnnnnnnnnnnnnnnnnnnnnnnnnnnnnnnnnnnnnnnnnnnnnnnnnnnnnnnnnnnnnnnnnnnnnnnnnnnnnnnnnnnnnnnnnnnnnnnnnnnnnnnnnnnnnnnnnnnnnnnnnnnnnnnnnnnnnnnnnnnnnnnnnnnnnnnnnnnnnnnnnnnnnnnnnnnnnnnnnnnnnnnnnnnnnnnnnnnnnnnnnnnnnnnnnnnnnnnnnnnnnnnnnnnnnnnnnnnnnnnnnnnnnnnnnnnnnnnnnnnnnnnnnnnnnnnnnnnnnnnnnnnnnnnnnnnnnnnnnnnnnnnnnnnnnnnnnnnnnnnnnnnnnnnnnnnnnnnnnnnnnnnnnnnnnnnnnnnnnnnnnnnnnnnnnnnnnnnnnnnnnnnnnnnnnnnnnnnnnnnnnnnnnnnnnnnnnnnnnnnnnnnnnnnnnnnnnnnnnnnnnnnnnnnnnnnnnnnnnnnnnnnnnnnnnnnnnnnnnnnnnnnnnnnnnnnnnnnnnnnnnnnnnnnnnnnnnnnnnnnnnnnnnnnnnnnnnnnnnnnnnnnnnnnnnnnnnnnnnnnnnnnnnnnnnnnnnnnnnnnnnnnnnnnnnnnnnnnnnnnnnnnnnnnnnnnnnnnnnnnnnnnnnnnnnnnnnnnnnnnnnnnnnnnnnnnnnnnnnnnnnnnnnnnnnnnnnnnnnnnnnnnnnnnnnnnnnnnnnnnnnnnnnnnnnnnnnnnnnnnnnnnnnnnnnnnnnnnnnnnnnnnnnnnnnnnnnnnnnnnnnnnnnnnnnnnnnnnnnnnnnnnnnnnnnnnnnnnnnnnnnnnnnnnnnnnnnnnnnnnnnnnnnnnnnnnnnnnnnnnnnnnnnnnnnnnnnnnnnnnnnnnnnnnnnnnnnnnnnnnnnnnnnnnnnnnnnnnnnnnnnnnnnnnnnnnnnnnnnnnnnnnnnnnnnnnnnnnnnnnnnnnnnnnnnnnnnnnnnnnnnnnnnnnnnnnnnnnnnnnnnnnnnnnnnnnnnnnnnnnnnnnnnnnnnnnnnnnnnnnnnnnnnnnnnnnnnnnnnnnnnnnnnnnnnnnnnnnnnnnnnnnnnnnnnnnnnnnnnnnnnnnnnnnnnnnnnnnnnnnnnnnnnnnnnnnnnnnnnnnnnnnnnnnnnnnnnnnnnnnnnnnnnnnnnnnnnnnnnnnnnnnnnnnnnnnnnnnnnnnnnnnnnnnnnnnnnnnnnnnnnnnnnnnnnnnnnnnnnnnnnnnnnnnnnnnnnnnnnnnnnnnnnnnnnnnnnnnnnnnnnnnnnnnnnnnnnnnnnnnnnnnnnnnnnnnnnnnnnnnnnnnnnnnnnnnnnnnnnnnnnnnnnnnnnnnnnnnnnnnnnnnnnnnnnnnnnnnnnnnnnnnnnnnnnnnnnnnnnnnnnnnnnnnnnnnnnnnnnnnnnnnnnnnnnnnnnnnnnnnnnnnnnnnnnnnnnnnnnnnnnnnnnnnnnnnnnnnnnnnnnnnnnnnnnnnnnnnnnnnnnnnnnnnnnnnnnnnnnnnnnnnnnnnnnnnnnnnnnnnnnnnnnnnnnnnnnnnnnnnnnnnnnnnnnnnnnnnnnnnnnnnnnnnnnnnnnnnnnnnnnnnnnnnnnnnnnnnnnnnnnnnnnnnnnnnnnnnnnnnnnnnnnnnnnnnnnnnnnnnnnnnnnnnnnnnnnnnnnnnnnnnnnnnnnnnnnnnnnnnnnnnnnnnnnnnnnnnnnnnnnnnnnnnnnnnnnnnnnnnnnnnnnnnnnnnnnnnnnnnnnnnnnnnnnnnnnnnnnnnnnnnnnnnnnnnnnnnnnnnnnnnnnnnnnnnnnnnnnnnnnnnnnnnnnnnnnnnnnnnnnnnnnnnnnnnnnnnnnnnnnnnnnnnnnnnnnnnnnnnnnnnnnnnnnnnnnnnnnnnnnnnnnnnnnnnnnnnnnnnnnnnnnnnnnnnnnnnnnnnnnnnnnnnnnnnnnnnnnnnnnnnnnnnnnnnnnnnnnnnnnnnnnnnnnnnnnnnnnnnnnnnnnnnnnnnnnnnnnnnnnnnnnnnnnnnnnnnnnnnnnnnnnnnnnnnnnnnnnnnnnnnnnnnnnnnnnnnnnnnnnnnnnnnnnnnnnnnnnnnnnnnnnnnnnnnnnnnnnnnnnnnnnnnnnnnnnnnnnnnnnnnnnnnnnnnnnnnnnnnnnnnnnnnnnnnnnnnnnnnnnnnnnnnnnnnnnnnnnnnnnnnnnnnnnnnnnnnnnnnnnnnnnnnnnnnnnnnnnnnnnnnnnnnnnnnnnnnnnnnnnnnnnnnnnnnnnnnnnnnnnnnnnnnnnnnnnnnnnnnnnnnnnnnnnnnnnnnnnnnnnnnnnnnnnnnnnnnnnnnnnnnnnnnnnnnnnnnnnnnnnnnnnnnnnnnnnnnnnnnnnnnnnnnnnnnnnnnnnnnnnnnnnnnnnnnnnnnnnnnnnnnnnnnnnnnnnnnnnnnnnnnnnnnnnnnnnnnnnnnnnnnnnnnnnnnnnnnnnnnnnnnnnnnnnnnnnnnnnnnnnnnnnnnnnnnnnnnnnnnnnnnnnnnnnnnnnnnnnnnnnnnnnnnnnnnnnnnnnnnnnnnnnnnnnnnnnnnnnnnnnnnnnnnnnnnnnnnnnnnnnnnnnnnnnnnnnnnnnnnnnnnnnnnnnnnnnnnnnnnnnnnnnnnnnnnnnnnnnnnnnnnnnnnnnnnnnnnnnnnnnnnnnnnnnnnnnnnnnnnnnnnnnnnnnnnnnnnnnnnnnnnnnnnnnnnnnnnnnnnnnnnnnnnnnnnnnnnnnnnnnnnnnnnnnnnnnnnnnnnnnnnnnnnnnnnnnnnnnnnnnnnnnnnnnnnnnnnnnnnnnnnnnnnnnnnnnnnnnnnnnnnnnnnnnnnnnnnnnnnnnnnnnnnnnnnnnnnnnnnnnnnnnnnnnnnnnnnnnnnnnnnnnnnnnnnnnnnnnnnnnnnnnnnnnnnnnnnnnnnnnnnnnnnnnnnnnnnnnnnnnnnnnnnnnnnnnnnnnnnnnnnnnnnnnnnnnnnnnnnnnnnnnnnnnnnnnnnnnnnnnnnnnnnnnnnnnnnnnnnnnnnnnnnnnnnnnnnnnnnnnnnnnnnnnnnnnnnnnnnnnnnnnnnnnnnnnnnnnnnnnnnnnnnnnnnnnnnnnnnnnnnnnnnnnnnnnnnnnnnnnnnnnnnnnnnnnnnnnnnnnnnnnnnnnnnnnnnnnnnnnnnnnnnnnnnnnnnnnnnnnnnnnnnnnnnnnnnnnnnnnnnnnnnnnnnnnnnnnnnnnnnnnnnnnnnnnnnnnnnnnnnnnnnnnnnnnnnnnnnnnnnnnnnnnnnnnnnnnnnnnnnnnnnnnnnnnnnnnnnnnnnnnnnnnnnnnnnnnnnnnnnnnnnnnnnnnnnnnnnnnnnnnnnnnnnnnnnnnnnnnnnnnnnnnnnnnnnnnnnnnnnnnnnnnnnnnnnnnnnnnnnnnnnnnnnnnnnnnnnnnnnnnnnnnnnnnnnnnnnnnnnnnnnnnnnnnnnnnnnnnnnnnnnnnnnnnnnnnnnnnnnnnnnnnnnnnnnnnnnnnnnnnnnnnnnnnnnnnnnnnnnnnnnnnnnnnnnnnnnnnnnnnnnnnnnnnnnnnnnnnnnnnnnnnnnnnnnnnnnnnnnnnnnnnnnnnnnnnnnnnnnnnnnnnnnnnnnnnnnnnnnnnnnnnnnnnnnnnnnnnnnnnnnnnnnnnnnnnnnnnnnnnnnnnnnnnnnnnnnnnnnnnnnnnnnnnnnnnnnnnnnnnnnnnnnnnnnnnnnnnnnnnnnnnnnnnnnnnnnnnnnnnnnnnnnnnnnnnnnnnnnnnnnnnnnnnnnnnnnnnnnnnnnnnnnnnnnnnnnnnnnnnnnnnnnnnnnnnnnnnnnnnnnnnnnnnnnnnnnnnnnnnnnnnnnnnnnnnnnnnnnnnnnnnnnnnnnnnnnnnnnnnnnnnnnnnnnnnnnnnnnnnnnnnnnnnnnnnnnnnnnnnnnnnnnnnnnnnnnnnnnnnnnnnnnnnnnnnnnnnnnnnnnnnnnnnnnnnnnnnnnnnnnnnnnnnnnnnnnnnnnnnnnnnnnnnnnnnnnnnnnnnnnnnnnnnnnnnnnnnnnnnnnnnnnnnnnnnnnnnnnnnnnnnnnnnnnnnnnnnnnnnnnnnnnnnnnnnnnnnnnnnnnnnnnnnnnnnnnnnnnnnnnnnnnnnnnnnnnnnnnnnnnnnnnnnnnnnnnnnnnnnnnnnnnnnnnnnnnnnnnnnnnnnnnnnnnnnnnnnnnnnnnnnnnnnnnnnnnnnnnnnnnnnnnnnnnnnnnnnnnnnnnnnnnnnnnnnnnnnnnnnnnnnnnnnnnnnnnnnnnnnnnnnnnnnnnnnnnnnnnnnnnnnnnnnnnnnnnnnnnnnnnnnnnnnnnnnnnnnnnnnnnnnnnnnnnnnnnnnnnnnnnnnnnnnnnnnnnnnnnnnnnnnnnnnnnnnnnnnnnnnnnnnnnnnnnnnnnnnnnnnnnnnnnnnnnnnnnnnnnnnnnnnnnnnnnnnnnnnnnnnnnnnnnnnnnnnnnnnnnnnnnnnnnnnnnnnnnnnnnnnnnnnnnnnnnnnnnnnnnnnnnnnnnnnnnnnnnnnnnnnnnnnnnnnnnnnnnnnnnnnnnnnnnnnnnnnnnnnnnnnnnnnnnnnnnnnnnnnnnnnnnnnnnnnnnnnnnnnnnnnnnnnnnnnnnnnnnnnnnnnnnnnnnnnnnnnnnnnnnnnnnnnnnnnnnnnnnnnnnnnnnnnnnnnnnnnnnnnnnnnnnnnnnnnnnnnnnnnnnnnnnnnnnnnnnnnnnnnnnnnnnnnnnnnnnnnnnnnnnnnnnnnnnnnnnnnnnnnnnnnnnnnnnnnnnnnnnnnnnnnnnnnnnnnnnnnnnnnnnnnnnnnnnnnnnnnnnnnnnnnnnnnnnnnnnnnnnnnnnnnnnnnnnnnnnnnnnnnnnnnnnnnnnnnnnnnnnnnnnnnnnnnnnnnnnnnnnnnnnnnnnnnnnnnnnnnnnnnnnnnnnnnnnnnnnnnnnnnnnnnnnnnnnnnnnnnnnnnnnnnnnnnnnnnnnnnnnnnnnnnnnnnnnnnnnnnnnnnnnnnnnnnnnnnnnnnnnnnnnnnnnnnnnnnnnnnnnnnnnnnnnnnnnnnnnnnnnnnnnnnnnnnnnnnnnnnnnnnnnnnnnnnnnnnnnnnnnnnnnnnnnnnnnnnnnnnnnnnnnnnnnnnnnnnnnnnnnnnnnnnnnnnnnnnnnnnnnnnnnnnnnnnnnnnnnnnnnnnnnnnnnnnnnnnnnnnnnnnnnnnnnnnnnnnnnnnnnnnnnnnnnnnnnnnnnnnnnnnnnnnnnnnnnnnnnnnnnnnnnnnnnnnnnnnnnnnnnnnnnnnnnnnnnnnnnnnnnnnnnnnnnnnnnnnnnnnnnnnnnnnnnnnnnnnnnnnnnnnnnnnnnnnnnnnnnnnnnnnnnnnnnnnnnnnnnnnnnnnnnnnnnnnnnnnnnnnnnnnnnnnnnnnnnnnnnnnnnnnnnnnnnnnnnnnnnnnnnnnnnnnnnnnnnnnnnnnnnnnnnnnnnnnnnnnnnnnnnnnnnnnnnnnnnnnnnnnnnnnnnnnnnnnnnnnnnnnnnnnnnnnnnnnnnnnnnnnnnnnnnnnnnnnnnnnnnnnnnnnnnnnnnnnnnnnnnnnnnnnnnnnnnnnnnnnnnnnnnnnnnnnnnnnnnnnnnnnnnnnnnnnnnnnnnnnnnnnnnnnnnnnnnnnnnnnnnnnnnnnnnnnnnnnnnnnnnnnnnnnnnnnnnnnnnnnnnnnnnnnnnnnnnnnnnnnnnnnnnnnnnnnnnnnnnnnnnnnnnnnnnnnnnnnnnnnnnnnnnnnnnnnnnnnnnnnnnnnnnnnnnnnnnnnnnnnnnnnnnnnnnnnnnnnnnnnnnnnnnnnnnnnnnnnnnnnnnnnnnnnnnnnnnnnnnnnnnnnnnnnnnnnnnnnnnnnnnnnnnnnnnnnnnnnnnnnnnnnnnnnnnnnnnnnnnnnnnnnnnnnnnnnnnnnnnnnnnnnnnnnnnnnnnnnnnnnnnnnnnnnnnnnnnnnnnnnnnnnnnnnnnnnnnnnnnnnnnnnnnnnnnnnnnnnnnnnnnnnnnnnnnnnnnnnnnnnnnnnnnnnnnnnnnnnnnnnnnnnnnnnnnnnnnnnnnnnnnnnnnnnnnnnnnnnnnnnnnnnnnnnnnnnnnnnnnnnnnnnnnnnnnnnnnnnnnnnnnnnnnnnnnnnnnnnnnnnnnnnnnnnnnnnnnnnnnnnnnnnnnnnnnnnnnnnnnnnnnnnnnnnnnnnnnnnnnnnnnnnnnnnnnnnnnnnnnnnnnnnnnnnnnnnnnnnnnnnnnnnnnnnnnnnnnnnnnnnnnnnnnnnnnnnnnnnnnnnnnnnnnnnnnnnnnnnnnnnnnnnnnnnnnnnnnnnnnnnnnnnnnnnnnnnnnnnnnnnnnnnnnnnnnnnnnnnnnnnnnnnnnnnnnnnnnnnnnnnnnnnnnnnnnnnnnnnnnnnnnnnnnnnnnnnnnnnnnnnnnnnnnnnnnnnnnnnnnnnnnnnnnnnnnnnnnnnnnnnnnnnnnnnnnnnnnnnnnnnnnnnnnnnnnnnnnnnnnnnnnnnnnnnnnnnnnnnnnnnnnnnnnnnnnnnnnnnnnnnnnnnnnnnnnnnnnnnnnnnnnnnnnnnnnnnnnnnnnnnnnnnnnnnnnnnnnnnnnnnnnnnnnnnnnnnnnnnnnnnnnnnnnnnnnnnnnnnnnnnnnnnnnnnnnnnnnnnnnnnnnnnnnnnnnnnnnnnnnnnnnnnnnnnnnnnnnnnnnnnnnnnnnnnnnnnnnnnnnnnnnnnnnnnnnnnnnnnnnnnnnnnnnnnnnnnnnnnnnnnnnnnnnnnnnnnnnnnnnnnnnnnnnnnnnnnnnnnnnnnnnnnnnnnnnnnnnnnnnnnnnnnnnnnnnnnnnnnnnnnnnnnnnnnnnnnnnnnnnnnnnnnnnnnnnnnnnnnnnnnnnnnnnnnnnnnnnnnnnnnnnnnnnnnnnnnnnnnnnnnnnnnnnnnnnnnnnnnnnnnnnnnnnnnnnnnnnnnnnnnnnnnnnnnnnnnnnnnnnnnnnnnnnnnnnnnnnnnnnnnnnnnnnnnnnnnnnnnnnnnnnnnnnnnnnnnnnnnnnnnnnnnnnnnnnnnnnnnnnnnnnnnnnnnnnnnnnnnnnnnnnnnnnnnnnnnnnnnnnnnnnnnnnnnnnnnnnnnnnnnnnnnnnnnnnnnnnnnnnnnnnnnnnnnnnnnnnnnnnnnnnnnnnnnnnnnnnnnnnnnnnnnnnnnnnnnnnnnnnnnnnnnnnnnnnnnnnnnnnnnnnnnnnnnnnnnnnnnnnnnnnnnnnnnnnnnnnnnnnnnnnnnnnnnnnnnnnnnnnnnnnnnnnnnnnnnnnnnnnnnnnnnnnnnnnnnnnnnnnnnnnnnnnnnnnnnnnnnnnnnnnnnnnnnnnnnnnnnnnnnnnnnnnnnnnnnnnnnnnnnnnnnnnnnnnnnnnnnnnnnnnnnnnnnnnnnnnnnnnnnnnnnnnnnnnnnnnnnnnnnnnnnnnnnnnnnnnnnnnnnnnnnnnnnnnnnnnnnnnnnnnnnnnnnnnnnnnnnnnnnnnnnnnnnnnnnnnnnnnnnnnnnnnnnnnnnnnnnnnnnnnnnnnnnnnnnnnnnnnnnnnnnnnnnnnnnnnnnnnnnnnnnnnnnnnnnnnnnnnnnnnnnnnnnnnnnnnnnnnnnnnnnnnnnnnnnnnnnnnnnnnnnnnnnnnnnnnnnnnnnnnnnnnnnnnnnnnnnnnnnnnnnnnnnnnnnnnnnnnnnnnnnnnnnnnnnnnnnnnnnnnnnnnnnnnnnnnnnnnnnnnnnnnnnnnnnnnnnnnnnnnnnnnnnnnnnnnnnnnnnnnnnnnnnnnnnnnnnnnnnnnnnnnnnnnnnnnnnnnnnnnnnnnnnnnnnnnnnnnnnnnnnnnnnnnnnnnnnnnnnnnnnnnnnnnnnnnnnnnnnnnnnnnnnnnnnnnnnnnnnnnnnnnnnnnnnnnnnnnnnnnnnnnnnnnnnnnnnnnnnnnnnnnnnnnnnnnnnnnnnnnnnnnnnnnnnnnnnnnnnnnnnnnnnnnnnnnnnnnnnnnnnnnnnnnnnnnnnnnnnnnnnnnnnnnnnnnnnnnnnnnnnnnnnnnnnnnnnnnnnnnnnnnnnnnnnnnnnnnnnnnnnnnnnnnnnnnnnnnnnnnnnnnnnnnnnnnnnnnnnnnnnnnnnnnnnnnnnnnnnnnnnnnnnnnnnnnnnnnnnnnnnnnnnnnnnnnnnnnnnnnnnnnnnnnnnnnnnnnnnnnnnnnnnnnnnnnnnnnnnnnnnnnnnnnnnnnnnnnnnnnnnnnnnnnnnnnnnnnnnnnnnnnnnnnnnnnnnnnnnnnnnnnnnnnnnnnnnnnnnnnnnnnnnnnnnnnnnnnnnnnnnnnnnnnnnnnnnnnnnnnnnnnnnnnnnnnnnnnnnnnnnnnnnnnnnnnnnnnnnnnnnnnnnnnnnnnnnnnnnnnnnnnnnnnnnnnnnnnnnnnnnnnnnnnnnnnnnnnnnnnnnnnnnnnnnnnnnnnnnnnnnnnnnnnnnnnnnnnnnnnnnnnnnnnnnnnnnnnnnnnnnnnnnnnnnnnnnnnnnnnnnnnnnnnnnnnnnnnnnnnnnnnnnnnnnnnnnnnnnnnnnnnnnnnnnnnnnnnnnnnnnnnnnnnnnnnnnnnnnnnnnnnnnnnnnnnnnnnnnnnnnnnnnnnnnnnnnnnnnnnnnnnnnnnnnnnnnnnnnnnnnnnnnnnnnnnnnnnnnnnnnnnnnnnnnnnnnnnnnnnnnnnnnnnnnnnnnnnnnnnnnnnnnnnnnnnnnnnnnnnnnnnnnnnnnnnnnnnnnnnnnnnnnnnnnnnnnnnnnnnnnnnnnnnnnnnnnnnnnnnnnnnnnnnnnnnnnnnnnnnnnnnnnnnnnnnnnnnnnnnnnnnnnnnnnnnnnnnnnnnnnnnnnnnnnnnnnnnnnnnnnnnnnnnnnnnnnnnnnnnnnnnnnnnnnnnnnnnnnnnnnnnnnnnnnnnnnnnnnnnnnnnnnnnnnnnnnnnnnnnnnnnnnnnnnnnnnnnnnnnnnnnnnnnnnnnnnnnnnnnnnnnnnnnnnnnnnnnnnnnnnnnnnnnnnnnnnnnnnnnnnnnnnnnnnnnnnnnnnnnnnnnnnnnnnnnnnnnnnnnnnnnnnnnnnnnnnnnnnnnnnnnnnnnnnnnnnnnnnnnnnnnnnnnnnnnnnnnnnnnnnnnnnnnnnnnnnnnnnnnnnnnnnnnnnnnnnnnnnnnnnnnnnnnnnnnnnnnnnnnnnnnnnnnnnnnnnnnnnnnnnnnnnnnnnnnnnnnnnnnnnnnnnnnnnnnnnnnnnnnnnnnnnnnnnnnnnnnnnnnnnnnnnnnnnnnnnnnnnnnnnnnnnnnnnnnnnnnnnnnnnnnnnnnnnnnnnnnnnnnnnnnnnnnnnnnnnnnnnnnnnnnnnnnnnnnnnnnnnnnnnnnnnnnnnnnnnnnnnnnnnnnnnnnnnnnnnnnnnnnnnnnnnnnnnnnnnnnnnnnnnnnnnnnnnnnnnnnnnnnnnnnnnnnnnnnnnnnnnnnnnnnnnnnnnnnnnnnnnnnnnnnnnnnnnnnnnnnnnnnnnnnnnnnnnnnnnnnnnnnnnnnnnnnnnnnnnnnnnnnnnnnnnnnnnnnnnnnnnnnnnnnnnnnnnnnnnnnnnnnnnnnnnnnnnnnnnnnnnnnnnnnnnnnnnnnnnnnnnnnnnnnnnnnnnnnnnnnnnnnnnnnnnnnnnnnnnnnnnnnnnnnnnnnnnnnnnnnnnnnnnnnnnnnnnnnnnnnnnnnnnnnnnnnnnnnnnnnnnnnnnnnnnnnnnnnnnnnnnnnnnnnnnnnnnnnnnnnnnnnnnnnnnnnnnnnnnnnnnnnnnnnnnnnnnnnnnnnnnnnnnnnnnnnnnnnnnnnnnnnnnnnnnnnnnnnnnnnnnnnnnnnnnnnnnnnnnnnnnnnnnnnnnnnnnnnnnnnnnnnnnnnnnnnnnnnnnnnnnnnnnnnnnnnnnnnnnnnnnnnnnnnnnnnnnnnnnnnnnnnnnnnnnnnnnnnnnnnnnnnnnnnnnnnnnnnnnnnnnnnnnnnnnnnnnnnnnnnnnnnnnnnnnnnnnnnnnnnnnnnnnnnnnnnnnnnnnnnnnnnnnnnnnnnnnnnnnnnnnnnnnnnnnnnnnnnnnnnnnnnnnnnnnnnnnnnnnnnnnnnnnnnnnnnnnnnnnnnnnnnnnnnnnnnnnnnnnnnnnnnnnnnnnnnnnnnnnnnnnnnnnnnnnnnnnnnnnnnnnnnnnnnnnnnnnnnnnnnnnnnnnnnnnnnnnnnnnnnnnnnnnnnnnnnnnnnnnnnnnnnnnnnnnnnnnnnnnnnnnnnnnnnnnnnnnnnnnnnnnnnnnnnnnnnnnnnnnnnnnnnnnnnnnnnnnnnnnnnnnnnnnnnnnnnnnnnnnnnnnnnnnnnnnnnnnnnnnnnnnnnnnnnnnnnnnnnnnnnnnnnnnnnnnnnnnnnnnnnnnnnnnnnnnnnnnnnnnnnnnnnnnnnnnnnnnnnnnnnnnnnnnnnnnnnnnnnnnnnnnnnnnnnnnnnnnnnnnnnnnnnnnnnnnnnnnnnnnnnnnnnnnnnnnnnnnnnnnnnnnnnnnnnnnnnnnnnnnnnnnnnnnnnnnnnnnnnnnnnnnnnnnnnnnnnnnnnnnnnnnnnnnnnnnnnnnnnnnnnnnnnnnnnnnnnnnnnnnnnnnnnnnnnnnnnnnnnnnnnnnnnnnnnnnnnnnnnnnnnnnnnnnnnnnnnnnnnnnnnnnnnnnnnnnnnnnnnnnnnnnnnnnnnnnnnnnnnnnnnnnnnnnnnnnnnnnnnnnnnnnnnnnnnnnnnnnnnnnnnnnnnnnnnnnnnnnnnnnnnnnnnnnnnnnnnnnnnnnnnnnnnnnnnnnnnnnnnnnnnnnnnnnnnnnnnnnnnnnnnnnnnnnnnnnnnnnnnnnnnnnnnnnnnnnnnnnnnnnnnnnnnnnnnnnnnnnnnnnnnnnnnnnnnnnnnnnnnnnnnnnnnnnnnnnnnnnnnnnnnnnnnnnnnnnnnnnnnnnnnnnnnnnnnnnnnnnnnnnnnnnnnnnnnnnnnnnnnnnnnnnnnnnnnnnnnnnnnnnnnnnnnnnnnnnnnnnnnnnnnnnnnnnnnnnnnnnnnnnnnnnnnnnnnnnnnnnnnnnnnnnnnnnnnnnnnnnnnnnnnnnnnnnnnnnnnnnnnnnnnnnnnnnnnnnnnnnnnnnnnnnnnnnnnnnnnnnnnnnnnnnnnnnnnnnnnnnnnnnnnnnnnnnnnnnnnnnnnnnnnnnnnnnnnnnnnnnnnnnnnnnnnnnnnnnnnnnnnnnnnnnnnnnnnnnnnnnnnnnnnnnnnnnnnnnnnnnnnnnnnnnnnnnnnnnnnnnnnnnnnnnnnnnnnnnnnnnnnnnnnnnnnnnnnnnnnnnnnnnnnnnnnnnnnnnnnnnnnnnnnnnnnnnnnnnnnnnnnnnnnnnnnnnnnnnnnnnnnnnnnnnnnnnnnnnnnnnnnnnnnnnnnnnnnnnnnnnnnnnnnnnnnnnnnnnnnnnnnnnnnnnnnnnnnnnnnnnnnnnnnnnnnnnnnnnnnnnnnnnnnnnnnnnnnnnnnnnnnnnnnnnnnnnnnnnnnnnnnnnnnnnnnnnnnnnnnnnnnnnnnnnnnnnnnnnnnnnnnnnnnnnnnnnnnnnnnnnnnnnnnnnnnnnnnnnnnnnnnnnnnnnnnnnnnnnnnnnnnnnnnnnnnnnnnnnnnnnnnnnnnnnnnnnnnnnnnnnnnnnnnnnnnnnnnnnnnnnnnnnnnnnnnnnnnnnnnnnnnnnnnnnnnnnnnnnnnnnnnnnnnnnnnnnnnnnnnnnnnnnnnnnnnnnnnnnnnnnnnnnnnnnnnnnnnnnnnnnnnnnnnnnnnnnnnnnnnnnnnnnnnnnnnnnnnnnnnnnnnnnnnnnnnnnnnnnnnnnnnnnnnnnnnnnnnnnnnnnnnnnnnnnnnnnnnnnnnnnnnnnnnnnnnnnnnnnnnnnnnnnnnnnnnnnnnnnnnnnnnnnnnnnnnnnnnnnnnnnnnnnnnnnnnnnnnnnnnnnnnnnnnnnnnnnnnnnnnnnnnnnnnnnnnnnnnnnnnnnnnnnnnnnnnnnnnnnnnnnnnnnnnnnnnnnnnnnnnnnnnnnnnnnnnnnnnnnnnnnnnnnnnnnnnnnnnnnnnnnnnnnnnnnnnnnnnnnnnnnnnnnnnnnnnnnnnnnnnnnnnnnnnnnnnnnnnnnnnnnnnnnnnnnnnnnnnnnnnnnnnnnnnnnnnnnnnnnnnnnnnnnnnnnnnnnnnnnnnnnnnnnnnnnnnnnnnnnnnnnnnnnnnnnnnnnnnnnnnnnnnnnnnnnnnnnnnnnnnnnnnnnnnnnnnnnnnnnnnnnnnnnnnnnnnnnnnnnnnnnnnnnnnnnnnnnnnnnnnnnnnnnnnnnnnnnnnnnnnnnnnnnnnnnnnnnnnnnnnnnnnnnnnnnnnnnnnnnnnnnnnnnnnnnnnnnnnnnnnnnnnnnnnnnnnnnnnnnnnnnnnnnnnnnnnnnnnnnnnnnnnnnnnnnnnnnnnnnnnnnnnnnnnnnnnnnnnnnnnnnnnnnnnnnnnnnnnnnnnnnnnnnnnnnnnnnnnnnnnnnnnnnnnnnnnnnnnnnnnnnnnnnnnnnnnnnnnnnnnnnnnnnnnnnnnnnnnnnnnnnnnnnnnnnnnnnnnnnnnnnnnnnnnnnnnnnnnnnnnnnnnnnnnnnnnnnnnnnnnnnnnnnnnnnnnnnnnnnnnnnnnnnnnnnnnnnnnnnnnnnnnnnnnnnnnnnnnnnnnnnnnnnnnnnnnnnnnnnnnnnnnnnnnnnnnnnnnnnnnnnnnnnnnnnnnnnnnnnnnnnnnnnnnnnnnnnnnnnnnnnnnnnnnnnnnnnnnnnnnnnnnnnnnnnnnnnnnnnnnnnnnnnnnnnnnnnnnnnnnnnnnnnnnnnnnnnnnnnnnnnnnnnnnnnnnnnnnnnnnnnnnnnnnnnnnnnnnnnnnnnnnnnnnnnnnnnnnnnnnnnnnnnnnnnnnnnnnnnnnnnnnnnnnnnnnnnnnnnnnnnnnnnnnnnnnnnnnnnnnnnnnnnnnnnnnnnnnnnnnnnnnnnnnnnnnnnnnnnnnnnnnnnnnnnnnnnnnnnnnnnnnnnnnnnnnnnnnnnnnnnnnnnnnnnnnnnnnnnnnnnnnnnnnnnnnnnnnnnnnnnnnnnnnnnnnnnnnnnnnnnnnnnnnnnnnnnnnnnnnnnnnnnnnnnnnnnnnnnnnnnnnnnnnnnnnnnnnnnnnnnnnnnnnnnnnnnnnnnnnnnnnnnnnnnnnnnnnnnnnnnnnnnnnnnnnnnnnnnnnnnnnnnnnnnnnnnnnnnnnnnnnnnnnnnnnnnnnnnnnnnnnnnnnnnnnnnnnnnnnnnnnnnnnnnnnnnnnnnnnnnnnnnnnnnnnnnnnnnnnnnnnnnnnnnnnnnnnnnnnnnnnnnnnnnnnnnnnnnnnnnnnnnnnnnnnnnnnnnnnnnnnnnnnnnnnnnnnnnnnnnnnnnnnnnnnnnnnnnnnnnnnnnnnnnnnnnnnnnnnnnnnnnnnnnnnnnnnnnnnnnnnnnnnnnnnnnnnnnnnnnnnnnnnnnnnnnnnnnnnnnnnnnnnnnnnnnnnnnnnnnnnnnnnnnnnnnnnnnnnnnnnnnnnnnnnnnnnnnnnnnnnnnnnnnnnnnnnnnnnnnnnnnnnnnnnnnnnnnnnnnnnnnnnnnnnnnnnnnnnnnnnnnnnnnnnnnnnnnnnnnnnnnnnnnnnnnnnnnnnnnnnnnnnnnnnnnnnnnnnnnnnnnnnnnnnnnnnnnnnnnnnnnnnnnnnnnnnnnnnnnnnnnnnnnnnnnnnnnnnnnnnnnnnnnnnnnnnnnnnnnnnnnnnnnnnnnnnnnnnnnnnnnnnnnnnnnnnnnnnnnnnnnnnnnnnnnnnnnnnnnnnnnnnnnnnnnnnnnnnnnnnnnnnnnnnnnnnnnnnnnnnnnnnnnnnnnnnnnnnnnnnnnnnnnnnnnnnnnnnnnnnnnnnnnnnnnnnnnnnnnnnnnnnnnnnnnnnnnnnnnnnnnnnnnnnnnnnnnnnnnnnnnnnnnnnnnnnnnnnnnnnnnnnnnnnnnnnnnnnnnnnnnnnnnnnnnnnnnnnnnnnnnnnnnnnnnnnnnnnnnnnnnnnnnnnnnnnnnnnnnnnnnnnnnnnnnnnnnnnnnnnnnnnnnnnnnnnnnnnnnnnnnnnnnnnnnnnnnnnnnnnnnnnnnnnnnnnnnnnnnnnnnnnnnnnnnnnnnnnnnnnnnnnnnnnnnnnnnnnnnnnnnnnnnnnnnnnnnnnnnnnnnnnnnnnnnnnnnnnnnnnnnnnnnnnnnnnnnnnnnnnnnnnnnnnnnnnnnnnnnnnnnnnnnnnnnnnnnnnnnnnnnnnnnnnnnnnnnnnnnnnnnnnnnnnnnnnnnnnnnnnnnnnnnnnnnnnnnnnnnnnnnnnnnnnnnnnnnnnnnnnnnnnnnnnnnnnnnnnnnnnnnnnnnnnnnnnnnnnnnnnnnnnnnnnnnnnnnnnnnnnnnnnnnnnnnnnnnnnnnnnnnnnnnnnnnnnnnnnnnnnnnnnnnnnnnnnnnnnnnnnnnnnnnnnnnnnnnnnnnnnnnnnnnnnnnnnnnnnnnnnnnnnnnnnnnnnnnnnnnnnnnnnnnnnnnnnnnnnnnnnnnnnnnnnnnnnnnnnnnnnnnnnnnnnnnnnnnnnnnnnnnnnnnnnnnnnnnnnnnnnnnnnnnnnnnnnnnnnnnnnnnnnnnnnnnnnnnnnnnnnnnnnnnnnnnnnnnnnnnnnnnnnnnnnnnnnnnnnnnnnnnnnnnnnnnnnnnnnnnnnnnnnnnnnnnnnnnnnnnnnnnnnnnnnnnnnnnnnnnnnnnnnnnnnnnnnnnnnnnnnnnnnnnnnnnnnnnnnnnnnnnnnnnnnnnnnnnnnnnnnnnnnnnnnnnnnnnnnnnnnnnnnnnnnnnnnnnnnnnnnnnnnnnnnnnnnnnnnnnnnnnnnnnnnnnnnnnnnnnnnnnnnnnnnnnnnnnnnnnnnnnnnnnnnnnnnnnnnnnnnnnnnnnnnnnnnnnnnnnnnnnnnnnnnnnnnnnnnnnnnnnnnnnnnnnnnnnnnnnnnnnnnnnnnnnnnnnnnnnnnnnnnnnnnnnnnnnnnnnnnnnnnnnnnnnnnnnnnnnnnnnnnnnnnnnnnnnnnnnnnnnnnnnnnnnnnnnnnnnnnnnnnnnnnnnnnnnnnnnnnnnnnnnnnnnnnnnnnnnnnnnnnnnnnnnnnnnnnnnnnnnnnnnnnnnnnnnnnnnnnnnnnnnnnnnnnnnnnnnnnnnnnnnnnnnnnnnnnnnnnnnnnnnnnnnnnnnnnnnnnnnnnnnnnnnnnnnnnnnnnnnnnnnnnnnnnnnnnnnnnnnnnnnnnnnnnnnnnnnnnnnnnnnnnnnnnnnnnnnnnnnnnnnnnnnnnnnnnnnnnnnnnnnnnnnnnnnnnnnnnnnnnnnnnnnnnnnnnnnnnnnnnnnnnnnnnnnnnnnnnnnnnnnnnnnnnnnnnnnnnnnnnnnnnnnnnnnnnnnnnnnnnnnnnnnnnnnnnnnnnnnnnnnnnnnnnnnnnnnnnnnnnnnnnnnnnnnnnnnnnnnnnnnnnnnnnnnnnnnnnnnnnnnnnnnnnnnnnnnnnnnnnnnnnnnnnnnnnnnnnnnnnnnnnnnnnnnnnnnnnnnnnnnnnnnnnnnnnnnnnnnnnnnnnnnnnnnnnnnnnnnnnnnnnnnnnnnnnnnnnnnnnnnnnnnnnnnnnnnnnnnnnnnnnnnnnnnnnnnnnnnnnnnnnnnnnnnnnnnnnnnnnnnnnnnnnnnnnnnnnnnnnnnnnnnnnnnnnnnnnnnnnnnnnnnnnnnnnnnnnnnnnnnnnnnnnnnnnnnnnnnnnnnnnnnnnnnnnnnnnnnnnnnnnnnnnnnnnnnnnnnnnnnnnnnnnnnnnnnnnnnnnnnnnnnnnnnnnnnnnnnnnnnnnnnnnnnnnnnnnnnnnnnnnnnnnnnnnnnnnnnnnnnnnnnnnnnnnnnnnnnnnnnnnnnnnnnnnnnnnnnnnnnnnnnnnnnnnnnnnnnnnnnnnnnnnnnnnnnnnnnnnnnnnnnnnnnnnnnnnnnnnnnnnnnnnnnnnnnnnnnnnnnnnnnnnnnnnnnnnnnnnnnnnnnnnnnnnnnnnnnnnnnnnnnnnnnnnnnnnnnnnnnnnnnnnnnnnnnnnnnnnnnnnnnnnnnnnnnnnnnnnnnnnnnnnnnnnnnnnnnnnnnnnnnnnnnnnnnnnnnnnnnnnnnnnnnnnnnnnnnnnnnnnnnnnnnnnnnnnnnnnnnnnnnnnnnnnnnnnnnnnnnnnnnnnnnnnnnnnnnnnnnnnnnnnnnnnnnnnnnnnnnnnnnnnnnnnnnnnnnnnnnnnnnnnnnnnnnnnnnnnnnnnnnnnnnnnnnnnnnnnnnnnnnnnnnnnnnnnnnnnnnnnnnnnnnnnnnnnnnnnnnnnnnnnnnnnnnnnnnnnnnnnnnnnnnnnnnnnnnnnnnnnnnnnnnnnnnnnnnnnnnnnnnnnnnnnnnnnnnnnnnnnnnnnnnnnnnnnnnnnnnnnnnnnnnnnnnnnnnnnnnnnnnnnnnnnnnnnnnnnnnnnnnnnnnnnnnnnnnnnnnnnnnnnnnnnnnnnnnnnnnnnnnnnnnnnnnnnnnnnnnnnnnnnnnnnnnnnnnnnnnnnnnnnnnnnnnnnnnnnnnnnnnnnnnnnnnnnnnnnnnnnnnnnnnnnnnnnnnnnnnnnnnnnnnnnnnnnnnnnnnnnnnnnnnnnnnnnnnnnnnnnnnnnnnnnnnnnnnnnnnnnnnnnnnnnnnnnnnnnnnnnnnnnnnnnnnnnnnnnnnnnnnnnnnnnnnnnnnnnnnnnnnnnnnnnnnnnnnnnnnnnnnnnnnnnnnnnnnnnnnnnnnnnnnnnnnnnnnnnnnnnnnnnnnnnnnnnnnnnnnnnnnnnnnnnnnnnnnnnnnnnnnnnnnnnnnnnnnnnnnnnnnnnnnnnnnnnnnnnnnnnnnnnnnnnnnnnnnnnnnnnnnnnnnnnnnnnnnnnnnnnnnnnnnnnnnnnnnnnnnnnnnnnnnnnnnnnnnnnnnnnnnnnnnnnnnnnnnnnnnnnnnnnnnnnnnnnnnnnnnnnnnnnnnnnnnnnnnnnnnnnnnnnnnnnnnnnnnnnnnnnnnnnnnnnnnnnnnnnnnnnnnnnnnnnnnnnnnnnnnnnnnnnnnnnnnnnnnnnnnnnnnnnnnnnnnnnnnnnnnnnnnnnnnnnnnnnnnnnnnnnnnnnnnnnnnnnnnnnnnnnnnnnnnnnnnnnnnnnnnnnnnnnnnnnnnnnnnnnnnnnnnnnnnnnnnnnnnnnnnnnnnnnnnnnnnnnnnnnnnnnnnnnnnnnnnnnnnnnnnnnnnnnnnnnnnnnnnnnnnnnnnnnnnnnnnnnnnnnnnnnnnnnnnnnnnnnnnnnnnnnnnnnnnnnnnnnnnnnnnnnnnnnnnnnnnnnnnnnnnnnnnnnnnnnnnnnnnnnnnnnnnnnnnnnnnnnnnnnnnnnnnnnnnnnnnnnnnnnnnnnnnnnnnnnnnnnnnnnnnnnnnnnnnnnnnnnnnnnnnnnnnnnnnnnnnnnnnnnnnnnnnnnnnnnnnnnnnnnnnnnnnnnnnnnnnnnnnnnnnnnnnnnnnnnnnnnnnnnnnnnnnnnnnnnnnnnnnnnnnnnnnnnnnnnnnnnnnnnnnnnnnnnnnnnnnnnnnnnnnnnnnnnnnnnnnnnnnnnnnnnnnnnnnnnnnnnnnnnnnnnnnnnnnnnnnnnnnnnnnnnnnnnnnnnnnnnnnnnnnnnnnnnnnnnnnnnnnnnnnnnnnnnnnnnnnnnnnnnnnnnnnnnnnnnnnnnnnnnnnnnnnnnnnnnnnnnnnnnnnnnnnnnnnnnnnnnnnnnnnnnnnnnnnnnnnnnnnnnnnnnnnnnnnnnnnnnnnnnnnnnnnnnnnnnnnnnnnnnnnnnnnnnnnnnnnnnnnnnnnnnnnnnnnnnnnnnnnnnnnnnnnnnnnnnnnnnnnnnnnnnnnnnnnnnnnnnnnnnnnnnnnnnnnnnnnnnnnnnnnnnnnnnnnnnnnnnnnnnnnnnnnnnnnnnnnnnnnnnnnnnnnnnnnnnnnnnnnnnnnnnnnnnnnnnnnnnnnnnnnnnnnnnnnnnnnnnnnnnnnnnnnnnnnnnnnnnnnnnnnnnnnnnnnnnnnnnnnnnnnnnnnnnnnnnnnnnnnnnnnnnnnnnnnnnnnnnnnnnnnnnnnnnnnnnnnnnnnnnnnnnnnnnnnnnnnnnnnnnnnnnnnnnnnnnnnnnnnnnnnnnnnnnnnnnnnnnnnnnnnnnnnnnnnnnnnnnnnnnnnnnnnnnnnnnnnnnnnnnnnnnnnnnnnnnnnnnnnnnnnnnnnnnnnnnnnnnnnnnnnnnnnnnnnnnnnnnnnnnnnnnnnnnnnnnnnnnnnnnnnnnnnnnnnnnnnnnnnnnnnnnnnnnnnnnnnnnnnnnnnnnnnnnnnnnnnnnnnnnnnnnnnnnnnnnnnnnnnnnnnnnnnnnnnnnnnnnnnnnnnnnnnnnnnnnnnnnnnnnnnnnnnnnnnnnnnnnnnnnnnnnnnnnnnnnnnnnnnnnnnnnnnnnnnnnnnnnnnnnnnnnnnnnnnnnnnnnnnnnnnnnnnnnnnnnnnnnnnnnnnnnnnnnnnnnnnnnnnnnnnnnnnnnnnnnnnnnnnnnnnnnnnnnnnnnnnnnnnnnnnnnnnnnnnnnnnnnnnnnnnnnnnnnnnnnnnnnnnnnnnnnnnnnnnnnnnnnnnnnnnnnnnnnnnnnnnnnnnnnnnnnnnnnnnnnnnnnnnnnnnnnnnnnnnnnnnnnnnnnnnnnnnnnnnnnnnnnnnnnnnnnnnnnnnnnnnnnnnnnnnnnnnnnnnnnnnnnnnnnnnnnnnnnnnnnnnnnnnnnnnnnnnnnnnnnnnnnnnnnnnnnnnnnnnnnnnnnnnnnnnnnnnnnnnnnnnnnnnnnnnnnnnnnnnnnnnnnnnnnnnnnnnnnnnnnnnnnnnnnnnnnnnnnnnnnnnnnnnnnnnnnnnnnnnnnnnnnnnnnnnnnnnnnnnnnnnnnnnnnnnnnnnnnnnnnnnnnnnnnnnnnnnnnnnnnnnnnnnnnnnnnnnnnnnnnnnnnnnnnnnnnnnnnnnnnnnnnnnnnnnnnnnnnnnnnnnnnnnnnnnnnnnnnnnnnnnnnnnnnnnnnnnnnnnnnnnnnnnnnnnnnnnnnnnnnnnnnnnnnnnnnnnnnnnnnnnnnnnnnnnnnnnnnnnnnnnnnnnnnnnnnnnnnnnnnnnnnnnnnnnnnnnnnnnnnnnnnnnnnnnnnnnnnnnnnnnnnnnnnnnnnnnnnnnnnnnnnnnnnnnnnnnnnnnnnnnnnnnnnnnnnnnnnnnnnnnnnnnnnnnnnnnnnnnnnnnnnnnnnnnnnnnnnnnnnnnnnnnnnnnnnnnnnnnnnnnnnnnnnnnnnnnnnnnnnnnnnnnnnnnnnnnnnnnnnnnnnnnnnnnnnnnnnnnnnnnnnnnnnnnnnnnnnnnnnnnnnnnnnnnnnnnnnnnnnnnnnnnnnnnnnnnnnnnnnnnnnnnnnnnnnnnnnnnnnnnnnnnnnnnnnnnnnnnnnnnnnnnnnnnnnnnnnnnnnnnnnnnnnnnnnnnnnnnnnnnnnnnnnnnnnnnnnnnnnnnnnnnnnnnnnnnnnnnnnnnnnnnnnnnnnnnnnnnnnnnnnnnnnnnnnnnnnnnnnnnnnnnnnnnnnnnnnnnnnnnnnnnnnnnnnnnnnnnnnnnnnnnnnnnnnnnnnnnnnnnnnnnnnnnnnnnnnnnnnnnnnnnnnnnnnnnnnnnnnnnnnnnnnnnnnnnnnnnnnnnnnnnnnnnnnnnnnnnnnnnnnnnnnnnnnnnnnnnnnnnnnnnnnnnnnnnnnnnnnnnnnnnnnnnnnnnnnnnnnnnnnnnnnnnnnnnnnnnnnnnnnnnnnnnnnnnnnnnnnnnnnnnnnnnnnnnnnnnnnnnnnnnnnnnnnnnnnnnnnnnnnnnnnnnnnnnnnnnnnnnnnnnnnnnnnnnnnnnnnnnnnnnnnnnnnnnnnnnnnnnnnnnnnnnnnnnnnnnnnnnnnnnnnnnnnnnnnnnnnnnnnnnnnnnnnnnnnnnnnnnnnnnnnnnnnnnnnnnnnnnnnnnnnnnnnnnnnnnnnnnnnnnnnnnnnnnnnnnnnnnnnnnnnnnnnnnnnnnnnnnnnnnnnnnnnnnnnnnnnnnnnnnnnnnnnnnnnnnnnnnnnnnnnnnnnnnnnnnnnnnnnnnnnnnnnnnnnnnnnnnnnnnnnnnnnnnnnnnnnnnnnnnnnnnnnnnnnnnnnnnnnnnnnnnnnnnnnnnnnnnnnnnnnnnnnnnnnnnnnnnnnnnnnnnnnnnnnnnnnnnnnnnnnnnnnnnnnnnnnnnnnnnnnnnnnnnnnnnnnnnnnnnnnnnnnnnnnnnnnnnnnnnnnnnnnnnnnnnnnnnnnnnnnnnnnnnnnnnnnnnnnnnnnnnnnnnnnnnnnnnnnnnnnnnnnnnnnnnnnnnnnnnnnnnnnnnnnnnnnnnnnnnnnnnnnnnnnnnnnnnnnnnnnnnnnnnnnnnnnnnnnnnnnnnnnnnnnnnnnnnnnnnnnnnnnnnnnnnnnnnnnnnnnnnnnnnnnnnnnnnnnnnnnnnnnnnnnnnnnnnnnnnnnnnnnnnnnnnnnnnnnnnnnnnnnnnnnnnnnnnnnnnnnnnnnnnnnnnnnnnnnnnnnnnnnnnnnnnnnnnnnnnnnnnnnnnnnnnnnnnnnnnnnnnnnnnnnnnnnnnnnnnnnnnnnnnnnnnnnnnnnnnnnnnnnnnnnnnnnnnnnnnnnnnnnnnnnnnnnnnnnnnnnnnnnnnnnnnnnnnnnnnnnnnnnnnnnnnnnnnnnnnnnnnnnnnnnnnnnnnnnnnnnnnnnnnnnnnnnnnnnnnnnnnnnnnnnnnnnnnnnnnnnnnnnnnnnnnnnnnnnnnnnnnnnnnnnnnnnnnnnnnnnnnnnnnnnnnnnnnnnnnnnnnnnnnnnnnnnnnnnnnnnnnnnnnnnnnnnnnnnnnnnnnnnnnnnnnnnnnnnnnnnnnnnnnnnnnnnnnnnnnnnnnnnnnnnnnnnnnnnnnnnnnnnnnnnnnnnnnnnnnnnnnnnnnnnnnnnnnnnnnnnnnnnnnnnnnnnnnnnnnnnnnnnnnnnnnnnnnnnnnnnnnnnnnnnnnnnnnnnnnnnnnnnnnnnnnnnnnnnnnnnnnnnnnnnnnnnnnnnnnnnnnnnnnnnnnnnnnnnnnnnnnnnnnnnnnnnnnnnnnnnnnnnnnnnnnnnnnnnnnnnnnnnnnnnnnnnnnnnnnnnnnnnnnnnnnnnnnnnnnnnnnnnnnnnnnnnnnnnnnnnnnnnnnnnnnnnnnnnnnnnnnnnnnnnnnnnnnnnnnnnnnnnnnnnnnnnnnnnnnnnnnnnnnnnnnnnnnnnnnnnnnnnnnnnnnnnnnnnnnnnnnnnnnnnnnnnnnnnnnnnnnnnnnnnnnnnnnnnnnnnnnnnnnnnnnnnnnnnnnnnnnnnnnnnnnnnnnnnnnnnnnnnnnnnnnnnnnnnnnnnnnnnnnnnnnnnnnnnnnnnnnnnnnnnnnnnnnnnnnnnnnnnnnnnnnnnnnnnnnnnnnnnnnnnnnnnnnnnnnnnnnnnnnnnnnnnnnnnnnnnnnnnnnnnnnnnnnnnnnnnnnnnnnnnnnnnnnnnnnnnnnnnnnnnnnnnnnnnnnnnnnnnnnnnnnnnnnnnnnnnnnnnnnnnnnnnnnnnnnnnnnnnnnnnnnnnnnnnnnnnnnnnnnnnnnnnnnnnnnnnnnnnnnnnnnnnnnnnnnnnnnnnnnnnnnnnnnnnnnnnnnnnnnnnnnnnnnnnnnnnnnnnnnnnnnnnnnnnnnnnnnnnnnnnnnnnnnnnnnnnnnnnnnnnnnnnnnnnnnnnnnnnnnnnnnnnnnnnnnnnnnnnnnnnnnnnnnnnnnnnnnnnnnnnnnnnnnnnnnnnnnnnnnnnnnnnnnnnnnnnnnnnnnnnnnnnnnnnnnnnnnnnnnnnnnnnnnnnnnnnnnnnnnnnnnnnnnnnnnnnnnnnnnnnnnnnnnnnnnnnnnnnnnnnnnnnnnnnnnnnnnnnnnnnnnnnnnnnnnnnnnnnnnnnnnnnnnnnnnnnnnnnnnnnnnnnnnnnnnnnnnnnnnnnnnnnnnnnnnnnnnnnnnnnnnnnnnnnnnnnnnnnnnnnnnnnnnnnnnnnnnnnnnnnnnnnnnnnnnnnnnnnnnnnnnnnnnnnnnnnnnnnnnnnnnnnnnnnnnnnnnnnnnnnnnnnnnnnnnnnnnnnnnnnnnnnnnnnnnnnnnnnnnnnnnnnnnnnnnnnnnnnnnnnnnnnnnnnnnnnnnnnnnnnnnnnnnnnnnnnnnnnnnnnnnnnnnnnnnnnnnnnnnnnnnnnnnnnnnnnnnnnnnnnnnnnnnnnnnnnnnnnnnnnnnnnnnnnnnnnnnnnnnnnnnnnnnnnnnnnnnnnnnnnnnnnnnnnnnnnnnnnnnnnnnnnnnnnnnnnnnnnnnnnnnnnnnnnnnnnnnnnnnnnnnnnnnnnnnnnnnnnnnnnnnnnnnnnnnnnnnnnnnnnnnnnnnnnnnnnnnnnnnnnnnnnnnnnnnnnnnnnnnnnnnnnnnnnnnnnnnnnnnnnnnnnnnnnnnnnnnnnnnnnnnnnnnnnnnnnnnnnnnnnnnnnnnnnnnnnnnnnnnnnnnnnnnnnnnnnnnnnnnnnnnnnnnnnnnnnnnnnnnnnnnnnnnnnnnnnnnnnnnnnnnnnnnnnnnnnnnnnnnnnnnnnnnnnnnnnnnnnnnnnnnnnnnnnnnnnnnnnnnnnnnnnnnnnnnnnnnnnnnnnnnnnnnnnnnnnnnnnnnnnnnnnnnnnnnnnnnnnnnnnnnnnnnnnnnnnnnnnnnnnnnnnnnnnnnnnnnnnnnnnnnnnnnnnnnnnnnnnnnnnnnnnnnnnnnnnnnnnnnnnnnnnnnnnnnnnnnnnnnnnnnnnnnnnnnnnnnnnnnnnnnnnnnnnnnnnnnnnnnnnnnnnnnnnnnnnnnnnnnnnnnnnnnnnnnnnnnnnnnnnnnnnnnnnnnnnnnnnnnnnnnnnnnnnnnnnnnnnnnnnnnnnnnnnnnnnnnnnnnnnnnnnnnnnnnnnnnnnnnnnnnnnnnnnnnnnnnnnnnnnnnnnnnnnnnnnnnnnnnnnnnnnnnnnnnnnnnnnnnnnnnnnnnnnnnnnnnnnnnnnnnnnnnnnnnnnnnnnnnnnnnnnnnnnnnnnnnnnnnnnnnnnnnnnnnnnnnnnnnnnnnnnnnnnnnnnnnnnnnnnnnnnnnnnnnnnnnnnnnnnnnnnnnnnnnnnnnnnnnnnnnnnnnnnnnnnnnnnnnnnnnnnnnnnnnnnnnnnnnnnnnnnnnnnnnnnnnnnnnnnnnnnnnnnnnnnnnnnnnnnnnnnnnnnnnnnnnnnnnnnnnnnnnnnnnnnnnnnnnnnnnnnnnnnnnnnnnnnnnnnnnnnnnnnnnnnnnnnnnnnnnnnnnnnnnnnnnnnnnnnnnnnnnnnnnnnnnnnnnnnnnnnnnnnnnnnnnnnnnnnnnnnnnnnnnnnnnnnnnnnnnnnnnnnnnnnnnnnnnnnnnnnnnnnnnnnnnnnnnnnnnnnnnnnnnnnnnnnnnnnnnnnnnnnnnnnnnnnnnnnnnnnnnnnnnnnnnnnnnnnnnnnnnnnnnnnnnnnnnnnnnnnnnnnnnnnnnnnnnnnnnnnnnnnnnnnnnnnnnnnnnnnnnnnnnnnnnnnnnnnnnnnnnnnnnnnnnnnnnnnnnnnnnnnnnnnnnnnnnnnnnnnnnnnnnnnnnnnnnnnnnnnnnnnnnnnnnnnnnnnnnnnnnnnnnnnnnnnnnnnnnnnnnnnnnnnnnnnnnnnnnnnnnnnnnnnnnnnnnnnnnnnnnnnnnnnnnnnnnnnnnnnnnnnnnnnnnnnnnnnnnnnnnnnnnnnnnnnnnnnnnnnnnnnnnnnnnnnnnnnnnnnnnnnnnnnnnnnnnnnnnnnnnnnnnnnnnnnnnnnnnnnnnnnnnnnnnnnnnnnnnnnnnnnnnnnnnnnnnnnnnnnnnnnnnnnnnnnnnnnnnnnnnnnnnnnnnnnnnnnnnnnnnnnnnnnnnnnnnnnnnnnnnnnnnnnnnnnnnnnnnnnnnnnnnnnnnnnnnnnnnnnnnnnnnnnnnnnnnnnnnnnnnnnnnnnnnnnnnnnnnnnnnnnnnnnnnnnnnnnnnnnnnnnnnnnnnnnnnnnnnnnnnnnnnnnnnnnnnnnnnnnnnnnnnnnnnnnnnnnnnnnnnnnnnnnnnnnnnnnnnnnnnnnnnnnnnnnnnnnnnnnnnnnnnnnnnnnnnnnnnnnnnnnnnnnnnnnnnnnnnnnnnnnnnnnnnnnnnnnnnnnnnnnnnnnnnnnnnnnnnnnnnnnnnnnnnnnnnnnnnnnnnnnnnnnnnnnnnnnnnnnnnnnnnnnnnnnnnnnnnnnnnnnnnnnnnnnnnnnnnnnnnnnnnnnnnnnnnnnnnnnnnnnnnnnnnnnnnnnnnnnnnnnnnnnnnnnnnnnnnnnnnnnnnnnnnnnnnnnnnnnnnnnnnnnnnnnnnnnnnnnnnnnnnnnnnnnnnnnnnnnnnnnnnnnnnnnnnnnnnnnnnnnnnnnnnnnnnnnnnnnnnnnnnnnnnnnnnnnnnnnnnnnnnnnnnnnnnnnnnnnnnnnnnnnnnnnnnnnnnnnnnnnnnnnnnnnnnnnnnnnnnnnnnnnnnnnnnnnnnnnnnnnnnnnnnnnnnnnnnnnnnnnnnnnnnnnnnnnnnnnnnnnnnnnnnnnnnnnnnnnnnnnnnnnnnnnnnnnnnnnnnnnnnnnnnnnnnnnnnnnnnnnnnnnnnnnnnnnnnnnnnnnnnnnnnnnnnnnnnnnnnnnnnnnnnnnnnnnnnnnnnnnnnnnnnnnnnnnnnnnnnnnnnnnnnnnnnnnnnnnnnnnnnnnnnnnnnnnnnnnnnnnnnnnnnnnnnnnnnnnnnnnnnnnnnnnnnnnnnnnnnnnnnnnnnnnnnnnnnnnnnnnnnnnnnnnnnnnnnnnnnnnnnnnnnnnnnnnnnnnnnnnnnnnnnnnnnnnnnnnnnnnnnnnnnnnnnnnnnnnnnnnnnnnnnnnnnnnnnnnnnnnnnnnnnnnnnnnnnnnnnnnnnnnnnnnnnnnnnnnnnnnnnnnnnnnnnnnnnnnnnnnnnnnnnnnnnnnnnnnnnnnnnnnnnnnnnnnnnnnnnnnnnnnnnnnnnnnnnnnnnnnnnnnnnnnnnnnnnnnnnnnnnnnnnnnnnnnnnnnnnnnnnnnnnnnnnnnnnnnnnnnnnnnnnnnnnnnnnnnnnnnnnnnnnnnnnnnnnnnnnnnnnnnnnnnnnnnnnnnnnnnnnnnnnnnnnnnnnnnnnnnnnnnnnnnnnnnnnnnnnnnnnnnnnnnnnnnnnnnnnnnnnnnnnnnnnnnnnnnnnnnnnnnnnnnnnnnnnnnnnnnnnnnnnnnnnnnnnnnnnnnnnnnnnnnnnnnnnnnnnnnnnnnnnnnnnnnnnnnnnnnnnnnnnnnnnnnnnnnnnnnnnnnnnnnnnnnnnnnnnnnnnnnnnnnnnnnnnnnnnnnnnnnnnnnnnnnnnnnnnnnnnnnnnnnnnnnnnnnnnnnnnnnnnnnnnnnnnnnnnnnnnnnnnnnnnnnnnnnnnnnnnnnnnnnnnnnnnnnnnnnnnnnnnnnnnnnnnnnnnnnnnnnnnnnnnnnnnnnnnnnnnnnnnnnnnnnnnnnnnnnnnnnnnnnnnnnnnnnnnnnnnnnnnnnnnnnnnnnnnnnnnnnnnnnnnnnnnnnnnnnnnnnnnnnnnnnnnnnnnnnnnnnnnnnnnnnnnnnnnnnnnnnnnnnnnnnnnnnnnnnnnnnnnnnnnnnnnnnnnnnnnnnnnnnnnnnnnnnnnnnnnnnnnnnnnnnnnnnnnnnnnnnnnnnnnnnnnnnnnnnnnnnnnnnnnnnnnnnnnnnnnnnnnnnnnnnnnnnnnnnnnnnnnnnnnnnnnnnnnnnnnnnnnnnnnnnnnnnnnnnnnnnnnnnnnnnnnnnnnnnnnnnnnnnnnnnnnnnnnnnnnnnnnnnnnnnnnnnnnnnnnnnnnnnnnnnnnnnnnnnnnnnnnnnnnnnnnnnnnnnnnnnnnnnnnnnnnnnnnnnnnnnnnnnnnnnnnnnnnnnnnnnnnnnnnnnnnnnnnnnnnnnnnnnnnnnnnnnnnnnnnnnnnnnnnnnnnnnnnnnnnnnnnnnnnnnnnnnnnnnnnnnnnnnnnnnnnnnnnnnnnnnnnnnnnnnnnnnnnnnnnnnnnnnnnnnnnnnnnnnnnnnnnnnnnnnnnnnnnnnnnnnnnnnnnnnnnnnnnnnnnnnnnnnnnnnnnnnnnnnnnnnnnnnnnnnnnnnnnnnnnnnnnnnnnnnnnnnnnnnnnnnnnnnnnnnnnnnnnnnnnnnnnnnnnnnnnnnnnnnnnnnnnnnnnnnnnnnnnnnnnnnnnnnnnnnnnnnnnnnnnnnnnnnnnnnnnnnnnnnnnnnnnnnnnnnnnnnnnnnnnnnnnnnnnnnnnnnnnnnnnnnnnnnnnnnnnnnnnnnnnnnnnnnnnnnnnnnnnnnnnnnnnnnnnnnnnnnnnnnnnnnnnnnnnnnnnnnnnnnnnnnnnnnnnnnnnnnnnnnnnnnnnnnnnnnnnnnnnnnnnnnnnnnnnnnnnnnnnnnnnnnnnnnnnnnnnnnnnnnnnnnnnnnnnnnnnnnnnnnnnnnnnnnnnnnnnnnnnnnnnnnnnnnnnnnnnnnnnnnnnnnnnnnnnnnnnnnnnnnnnnnnnnnnnnnnnnnnnnnnnnnnnnnnnnnnnnnnnnnnnnnnnnnnnnnnnnnnnnnnnnnnnnnnnnnnnnnnnnnnnnnnnnnnnnnnnnnnnnnnnnnnnnnnnnnnnnnnnnnnnnnnnnnnnnnnnnnnnnnnnnnnnnnnnnnnnnnnnnnnnnnnnnnnnnnnnnnnnnnnnnnnnnnnnnnnnnnnnnnnnnnnnnnnnnnnnnnnnnnnnnnnnnnnnnnnnnnnnnnnnnnnnnnnnnnnnnnnnnnnnnnnnnnnnnnnnnnnnnnnnnnnnnnnnnnnnnnnnnnnnnnnnnnnnnnnnnnnnnnnnnnnnnnnnnnnnnnnnnnnnnnnnnnnnnnnnnnnnnnnnnnnnnnnnnnnnnnnnnnnnnnnnnnnnnnnnnnnnnnnnnnnnnnnnnnnnnnnnnnnnnnnnnnnnnnnnnnnnnnnnnnnnnnnnnnnnnnnnnnnnnnnnnnnnnnnnnnnnnnnnnnnnnnnnnnnnnnnnnnnnnnnnnnnnnnnnnnnnnnnnnnnnnnnnnnnnnnnnnnnnnnnnnnnnnnnnnnnnnnnnnnnnnnnnnnnnnnnnnnnnnnnnnnnnnnnnnnnnnnnnnnnnnnnnnnnnnnnnnnnnnnnnnnnnnnnnnnnnnnnnnnnnnnnnnnnnnnnnnnnnnnnnnnnnnnnnnnnnnnnnnnnnnnnnnnnnnnnnnnnnnnnnnnnnnnnnnnnnnnnnnnnnnnnnnnnnnnnnnnnnnnnnnnnnnnnnnnnnnnnnnnnnnnnnnnnnnnnnnnnnnnnnnnnnnnnnnnnnnnnnnnnnnnnnnnnnnnnnnnnnnnnnnnnnnnnnnnnnnnnnnnnnnnnnnnnnnnnnnnnnnnnnnnnnnnnnnnnnnnnnnnnnnnnnnnnnnnnnnnnnnnnnnnnnnnnnnnnnnnnnnnnnnnnnnnnnnnnnnnnnnnnnnnnnnnnnnnnnnnnnnnnnnnnnnnnnnnnnnnnnnnnnnnnnnnnnnnnnnnnnnnnnnnnnnnnnnnnnnnnnnnnnnnnnnnnnnnnnnnnnnnnnnnnnnnnnnnnnnnnnnnnnnnnnnnnnnnnnnnnnnnnnnnnnnnnnnnnnnnnnnnnnnnnnnnnnnnnnnnnnnnnnnnnnnnnnnnnnnnnnnnnnnnnnnnnnnnnnnnnnnnnnnnnnnnnnnnnnnnnnnnnnnnnnnnnnnnnnnnnnnnnnnnnnnnnnnnnnnnnnnnnnnnnnnnnnnnnnnnnnnnnnnnnnnnnnnnnnnnnnnnnnnnnnnnnnnnnnnnnnnnnnnnnnnnnnnnnnnnnnnnnnnnnnnnnnnnnnnnnnnnnnnnnnnnnnnnnnnnnnnnnnnnnnnnnnnnnnnnnnnnnnnnnnnnnnnnnnnnnnnnnnnnnnnnnnnnnnnnnnnnnnnnnnnnnnnnnnnnnnnnnnnnnnnnnnnnnnnnnnnnnnnnnnnnnnnnnnnnnnnnnnnnnnnnnnnnnnnnnnnnnnnnnnnnnnnnnnnnnnnnnnnnnnnnnnnnnnnnnnnnnnnnnnnnnnnnnnnnnnnnnnnnnnnnnnnnnnnnnnnnnnnnnnnnnnnnnnnnnnnnnnnnnnnnnnnnnnnnnnnnnnnnnnnnnnnnnnnnnnnnnnnnnnnnnnnnnnnnnnnnnnnnnnnnnnnnnnnnnnnnnnnnnnnnnnnnnnnnnnnnnnnnnnnnnnnnnnnnnnnnnnnnnnnnnnnnnnnnnnnnnnnnnnnnnnnnnnnnnnnnnnnnnnnnnnnnnnnnnnnnnnnnnnnnnnnnnnnnnnnnnnnnnnnnnnnnnnnnnnnnnnnnnnnnnnnnnnnnnnnnnnnnnnnnnnnnnnnnnnnnnnnnnnnnnnnnnnnnnnnnnnnnnnnnnnnnnnnnnnnnnnnnnnnnnnnnnnnnnnnnnnnnnnnnnnnnnnnnnnnnnnnnnnnnnnnnnnnnnnnnnnnnnnnnnnnnnnnnnnnnnnnnnnnnnnnnnnnnnnnnnnnnnnnnnnnnnnnnnnnnnnnnnnnnnnnnnnnnnnnnnnnnnnnnnnnnnnnnnnnnnnnnnnnnnnnnnnnnnnnnnnnnnnnnnnnnnnnnnnnnnnnnnnnnnnnnnnnnnnnnnnnnnnnnnnnnnnnnnnnnnnnnnnnnnnnnnnnnnnnnnnnnnnnnnnnnnnnnnnnnnnnnnnnnnnnnnnnnnnnnnnnnnnnnnnnnnnnnnnnnnnnnnnnnnnnnnnnnnnnnnnnnnnnnnnnnnnnnnnnnnnnnnnnnnnnnnnnnnnnnnnnnnnnnnnnnnnnnnnnnnnnnnnnnnnnnnnnnnnnnnnnnnnnnnnnnnnnnnnnnnnnnnnnnnnnnnnnnnnnnnnnnnnnnnnnnnnnnnnnnnnnnnnnnnnnnnnnnnnnnnnnnnnnnnnnnnnnnnnnnnnnnnnnnnnnnnnnnnnnnnnnnnnnnnnnnnnnnnnnnnnnnnnnnnnnnnnnnnnnnnnnnnnnnnnnnnnnnnnnnnnnnnnnnnnnnnnnnnnnnnnnnnnnnnnnnnnnnnnnnnnnnnnnnnnnnnnnnnnnnnnnnnnnnnnnnnnnnnnnnnnnnnnnnnnnnnnnnnnnnnnnnnnnnnnnnnnnnnnnnnnnnnnnnnnnnnnnnnnnnnnnnnnnnnnnnnnnnnnnnnnnnnnnnnnnnnnnnnnnnnnnnnnnnnnnnnnnnnnnnnnnnnnnnnnnnnnnnnnnnnnnnnnnnnnnnnnnnnnnnnnnnnnnnnnnnnnnnnnnnnnnnnnnnnnnnnnnnnnnnnnnnnnnnnnnnnnnnnnnnnnnnnnnnnnnnnnnnnnnnnnnnnnnnnnnnnnnnnnnnnnnnnnnnnnnnnnnnnnnnnnnnnnnnnnnnnnnnnnnnnnnnnnnnnnnnnnnnnnnnnnnnnnnnnnnnnnnnnnnnnnnnnnnnnnnnnnnnnnnnnnnnnnnnnnnnnnnnnnnnnnnnnnnnnnnnnnnnnnnnnnnnnnnnnnnnnnnnnnnnnnnnnnnnnnnnnnnnnnnnnnnnnnnnnnnnnnnnnnnnnnnnnnnnnnnnnnnnnnnnnnnnnnnnnnnnnnnnnnnnnnnnnnnnnnnnnnnnnnnnnnnnnnnnnnnnnnnnnnnnnnnnnnnnnnnnnnnnnnnnnnnnnnnnnnnnnnnnnnnnnnnnnnnnnnnnnnnnnnnnnnnnnnnnnnnnnnnnnnnnnnnnnnnnnnnnnnnnnnnnnnnnnnnnnnnnnnnnnnnnnnnnnnnnnnnnnnnnnnnnnnnnnnnnnnnnnnnnnnnnnnnnnnnnnnnnnnnnnnnnnnnnnnnnnnnnnnnnnnnnnnnnnnnnnnnnnnnnnnnnnnnnnnnnnnnnnnnnnnnnnnnnnnnnnnnnnnnnnnnnnnnnnnnnnnnnnnnnnnnnnnnnnnnnnnnnnnnnnnnnnnnnnnnnnnnnnnnnnnnnnnnnnnnnnnnnnnnnnnnnnnnnnnnnnnnnnnnnnnnnnnnnnnnnnnnnnnnnnnnnnnnnnnnnnnnnnnnnnnnnnnnnnnnnnnnnnnnnnnnnnnnnnnnnnnnnnnnnnnnnnnnnnnnnnnnnnnnnnnnnnnnnnnnnnnnnnnnnnnnnnnnnnnnnnnnnnnnnnnnnnnnnnnnnnnnnnnnnnnnnnnnnnnnnnnnnnnnnnnnnnnnnnnnnnnnnnnnnnnnnnnnnnnnnnnnnnnnnnnnnnnnnnnnnnnnnnnnnnnnnnnnnnnnnnnnnnnnnnnnnnnnnnnnnnnnnnnnnnnnnnnnnnnnnnnnnnnnnnnnnnnnnnnnnnnnnnnnnnnnnnnnnnnnnnnnnnnnnnnnnnnnnnnnnnnnnnnnnnnnnnnnnnnnnnnnnnnnnnnnnnnnnnnnnnnnnnnnnnnnnnnnnnnnnnnnnnnnnnnnnnnnnnnnnnnnnnnnnnnnnnnnnnnnnnnnnnnnnnnnnnnnnnnnnnnnnnnnnnnnnnnnnnnnnnnnnnnnnnnnnnnnnnnnnnnnnnnnnnnnnnnnnnnnnnnnnnnnnnnnnnnnnnnnnnnnnnnnnnnnnnnnnnnnnnnnnnnnnnnnnnnnnnnnnnnnnnnnnnnnnnnnnnnnnnnnnnnnnnnnnnnnnnnnnnnnnnnnnnnnnnnnnnnnnnnnnnnnnnnnnnnnnnnnnnnnnnnnnnnnnnnnnnnnnnnnnnnnnnnnnnnnnnnnnnnnnnnnnnnnnnnnnnnnnnnnnnnnnnnnnnnnnnnnnnnnnnnnnnnnnnnnnnnnnnnnnnnnnnnnnnnnnnnnnnnnnnnnnnnnnnnnnnnnnnnnnnnnnnnnnnnnnnnnnnnnnnnnnnnnnnnnnnnnnnnnnnnnnnnnnnnnnnnnnnnnnnnnnnnnnnnnnnnnnnnnnnnnnnnnnnnnnnnnnnnnnnnnnnnnnnnnnnnnnnnnnnnnnnnnnnnnnnnnnnnnnnnnnnnnnnnnnnnnnnnnnnnnnnnnnnnnnnnnnnnnnnnnnnnnnnnnnnnnnnnnnnnnnnnnnnnnnnnnnnnnnnnnnnnnnnnnnnnnnnnnnnnnnnnnnnnnnnnnnnnnnnnnnnnnnnnnnnnnnnnnnnnnnnnnnnnnnnnnnnnnnnnnnnnnnnnnnnnnnnnnnnnnnnnnnnnnnnnnnnnnnnnnnnnnnnnnnnnnnnnnnnnnnnnnnnnnnnnnnnnnnnnnnnnnnnnnnnnnnnnnnnnnnnnnnnnnnnnnnnnnnnnnnnnnnnnnnnnnnnnnnnnnnnnnnnnnnnnnnnnnnnnnnnnnnnnnnnnnnnnnnnnnnnnnnnnnnnnnnnnnnnnnnnnnnnnnnnnnnnnnnnnnnnnnnnnnnnnnnnnnnnnnnnnnnnnnnnnnnnnnnnnnnnnnnnnnnnnnnnnnnnnnnnnnnnnnnnnnnnnnnnnnnnnnnnnnnnnnnnnnnnnnnnnnnnnnnnnnnnnnnnnnnnnnnnnnnnnnnnnnnnnnnnnnnnnnnnnnnnnnnnnnnnnnnnnnnnnnnnnnnnnnnnnnnnnnnnnnnnnnnnnnnnnnnnnnnnnnnnnnnnnnnnnnnnnnnnnnnnnnnnnnnnnnnnnnnnnnnnnnnnnnnnnnnnnnnnnnnnnnnnnnnnnnnnnnnnnnnnnnnnnnnnnnnnnnnnnnnnnnnnnnnnnnnnnnnnnnnnnnnnnnnnnnnnnnnnnnnnnnnnnnnnnnnnnnnnnnnnnnnnnnnnnnnnnnnnnnnnnnnnnnnnnnnnnnnnnnnnnnnnnnnnnnnnnnnnnnnnnnnnnnnnnnnnnnnnnnnnnnnnnnnnnnnnnnnnnnnnnnnnnnnnnnnnnnnnnnnnnnnnnnnnnnnnnnnnnnnnnnnnnnnnnnnnnnnnnnnnnnnnnnnnnnnnnnnnnnnnnnnnnnnnnnnnnnnnnnnnnnnnnnnnnnnnnnnnnnnnnnnnnnnnnnnnnnnnnnnnnnnnnnnnnnnnnnnnnnnnnnnnnnnnnnnnnnnnnnnnnnnnnnnnnnnnnnnnnnnnnnnnnnnnnnnnnnnnnnnnnnnnnnnnnnnnnnnnnnnnnnnnnnnnnnnnnnnnnnnnnnnnnnnnnnnnnnnnnnnnnnnnnnnnnnnnnnnnnnnnnnnnnnnnnnnnnnnnnnnnnnnnnnnnnnnnnnnnnnnnnnnnnnnnnnnnnnnnnnnnnnnnnnnnnnnnnnnnnnnnnnnnnnnnnnnnnnnnnnnnnnnnnnnnnnnnnnnnnnnnnnnnnnnnnnnnnnnnnnnnnnnnnnnnnnnnnnnnnnnnnnnnnnnnnnnnnnnnnnnnnnnnnnnnnnnnnnnnnnnnnnnnnnnnnnnnnnnnnnnnnnnnnnnnnnnnnnnnnnnnnnnnnnnnnnnnnnnnnnnnnnnnnnnnnnnnnnnnnnnnnnnnnnnnnnnnnnnnnnnnnnnnnnnnnnnnnnnnnnnnnnnnnnnnnnnnnnnnnnnnnnnnnnnnnnnnnnnnnnnnnnnnnnnnnnnnnnnnnnnnnnnnnnnnnnnnnnnnnnnnnnnnnnnnnnnnnnnnnnnnnnnnnnnnnnnnnnnnnnnnnnnnnnnnnnnnnnnnnnnnnnnnnnnnnnnnnnnnnnnnnnnnnnnnnnnnnnnnnnnnnnnnnnnnnnnnnnnnnnnnnnnnnnnnnnnnnnnnnnnnnnnnnnnnnnnnnnnnnnnnnnnnnnnnnnnnnnnnnnnnnnnnnnnnnnnnnnnnnnnnnnnnnnnnnnnnnnnnnnnnnnnnnnnnnnnnnnnnnnnnnnnnnnnnnnnnnnnnnnnnnnnnnnnnnnnnnnnnnnnnnnnnnnnnnnnnnnnnnnnnnnnnnnnnnnnnnnnnnnnnnnnnnnnnnnnnnnnnnnnnnnnnnnnnnnnnnnnnnnnnnnnnnnnnnnnnnnnnnnnnnnnnnnnnnnnnnnnnnnnnnnnnnnnnnnnnnnnnnnnnnnnnnnnnnnnnnnnnnnnnnnnnnnnnnnnnnnnnnnnnnnnnnnnnnnnnnnnnnnnnnnnnnnnnnnnnnnnnnnnnnnnnnnnnnnnnnnnnnnnnnnnnnnnnnnnnnnnnnnnnnnnnnnnnnnnnnnnnnnnnnnnnnnnnnnnnnnnnnnnnnnnnnnnnnnnnnnnnnnnnnnnnnnnnnnnnnnnnnnnnnnnnnnnnnnnnnnnnnnnnnnnnnnnnnnnnnnnnnnnnnnnnnnnnnnnnnnnnnnnnnnnnnnnnnnnnnnnnnnnnnnnnnnnnnnnnnnnnnnnnnnnnnnnnnnnnnnnnnnnnnnnnnnnnnnnnnnnnnnnnnnnnnnnnnnnnnnnnnnnnnnnnnnnnnnnnnnnnnnnnnnnnnnnnnnnnnnnnnnnnnnnnnnnnnnnnnnnnnnnnnnnnnnnnnnnnnnnnnnnnnnnnnnnnnnnnnnnnnnnnnnnnnnnnnnnnnnnnnnnnnnnnnnnnnnnnnnnnnnnnnnnnnnnnnnnnnnnnnnnnnnnnnnnnnnnnnnnnnnnnnnnnnnnnnnnnnnnnnnnnnnnnnnnnnnnnnnnnnnnnnnnnnnnnnnnnnnnnnnnnnnnnnnnnnnnnnnnnnnnnnnnnnnnnnnnnnnnnnnnnnnnnnnnnnnnnnnnnnnnnnnnnnnnnnnnnnnnnnnnnnnnnnnnnnnnnnnnnnnnnnnnnnnnnnnnnnnnnnnnnnnnnnnnnnnnnnnnnnnnnnnnnnnnnnnnnnnnnnnnnnnnnnnnnnnnnnnnnnnnnnnnnnnnnnnnnnnnnnnnnnnnnnnnnnnnnnnnnnnnnnnnnnnnnnnnnnnnnnnnnnnnnnnnnnnnnnnnnnnnnnnnnnnnnnnnnnnnnnnnnnnnnnnnnnnnnnnnnnnnnnnnnnnnnnnnnnnnnnnnnnnnnnnnnnnnnnnnnnnnnnnnnnnnnnnnnnnnnnnnnnnnnnnnnnnnnnnnnnnnnnnnnnnnnnnnnnnnnnnnnnnnnnnnnnnnnnnnnnnnnnnnnnnnnnnnnnnnnnnnnnnnnnnnnnnnnnnnnnnnnnnnnnnnnnnnnnnnnnnnnnnnnnnnnnnnnnnnnnnnnnnnnnnnnnnnnnnnnnnnnnnnnnnnnnnnnnnnnnnnnnnnnnnnnnnnnnnnnnnnnnnnnnnnnnnnnnnnnnnnnnnnnnnnnnnnnnnnnnnnnnnnnnnnnnnnnnnnnnnnnnnnnnnnnnnnnnnnnnnnnnnnnnnnnnnnnnnnnnnnnnnnnnnnnnnnnnnnnnnnnnnnnnnnnnnnnnnnnnnnnnnnnnnnnnnnnnnnnnnnnnnnnnnnnnnnnnnnnnnnnnnnnnnnnnnnnnnnnnnnnnnnnnnnnnnnnnnnnnnnnnnnnnnnnnnnnnnnnnnnnnnnnnnnnnnnnnnnnnnnnnnnnnnnnnnnnnnnnnnnnnnnnnnnnnnnnnnnnnnnnnnnnnnnnnnnnnnnnnnnnnnnnnnnnnnnnnnnnnnnnnnnnnnnnnnnnnnnnnnnnnnnnnnnnnnnnnnnnnnnnnnnnnnnnnnnnnnnnnnnnnnnnnnnnnnnnnnnnnnnnnnnnnnnnnnnnnnnnnnnnnnnnnnnnnnnnnnnnnnnnnnnnnnnnnnnnnnnnnnnnnnnnnnnnnnnnnnnnnnnnnnnnnnnnnnnnnnnnnnnnnnnnnnnnnnnnnnnnnnnnnnnnnnnnnnnnnnnnnnnnnnnnnnnnnnnnnnnnnnnnnnnnnnnnnnnnnnnnnnnnnnnnnnnnnnnnnnnnnnnnnnnnnnnnnnnnnnnnnnnnnnnnnnnnnnnnnnnnnnnnnnnnnnnnnnnnnnnnnnnnnnnnnnnnnnnnnnnnnnnnnnnnnnnnnnnnnnnnnnnnnnnnnnnnnnnnnnnnnnnnnnnnnnnnnnnnnnnnnnnnnnnnnnnnnnnnnnnnnnnnnnnnnnnnnnnnnnnnnnnnnnnnnnnnnnnnnnnnnnnnnnnnnnnnnnnnnnnnnnnnnnnnnnnnnnnnnnnnnnnnnnnnnnnnnnnnnnnnnnnnnnnnnnnnnnnnnnnnnnnnnnnnnnnnnnnnnnnnnnnnnnnnnnnnnnnnnnnnnnnnnnnnnnnnnnnnnnnnnnnnnnnnnnnnnnnnnnnnnnnnnnnnnnnnnnnnnnnnnnnnnnnnnnnnnnnnnnnnnnnnnnnnnnnnnnnnnnnnnnnnnnnnnnnnnnnnnnnnnnnnnnnnnnnnnnnnnnnnnnnnnnnnnnnnnnnnnnnnnnnnnnnnnnnnnnnnnnnnnnnnnnnnnnnnnnnnnnnnnnnnnnnnnnnnnnnnnnnnnnnnnnnnnnnnnnnnnnnnnnnnnnnnnnnnnnnnnnnnnnnnnnnnnnnnnnnnnnnnnnnnnnnnnnnnnnnnnnnnnnnnnnnnnnnnnnnnnnnnnnnnnnnnnnnnnnnnnnnnnnnnnnnnnnnnnnnnnnnnnnnnnnnnnnnnnnnnnnnnnnnnnnnnnnnnnnnnnnnnnnnnnnnnnnnnnnnnnnnnnnnnnnnnnnnnnnnnnnnnnnnnnnnnnnnnnnnnnnnnnnnnnnnnnnnnnnnnnnnnnnnnnnnnnnnnnnnnnnnnnnnnnnnnnnnnnnnnnnnnnnnnnnnnnnnnnnnnnnnnnnnnnnnnnnnnnnnnnnnnnnnnnnnnnnnnnnnnnnnnnnnnnnnnnnnnnnnnnnnnnnnnnnnnnnnnnnnnnnnnnnnnnnnnnnnnnnnnnnnnnnnnnnnnnnnnnnnnnnnnnnnnnnnnnnnnnnnnnnnnnnnnnnnnnnnnnnnnnnnnnnnnnnnnnnnnnnnnnnnnnnnnnnnnnnnnnnnnnnnnnnnnnnnnnnnnnnnnnnnnnnnnnnnnnnnnnnnnnnnnnnnnnnnnnnnnnnnnnnnnnnnnnnnnnnnnnnnnnnnnnnnnnnnnnnnnnnnnnnnnnnnnnnnnnnnnnnnnnnnnnnnnnnnnnnnnnnnnnnnnnnnnnnnnnnnnnnnnnnnnnnnnnnnnnnnnnnnnnnnnnnnnnnnnnnnnnnnnnnnnnnnnnnnnnnnnnnnnnnnnnnnnnnnnnnnnnnnnnnnnnnnnnnnnnnnnnnnnnnnnnnnnnnnnnnnnnnnnnnnnnnnnnnnnnnnnnnnnnnnnnnnnnnnnnnnnnnnnnnnnnnnnnnnnnnnnnnnnnnnnnnnnnnnnnnnnnnnnnnnnnnnnnnnnnnnnnnnnnnnnnnnnnnnnnnnnnnnnnnnnnnnnnnnnnnnnnnnnnnnnnnnnnnnnnnnnnnnnnnnnnnnnnnnnnnnnnnnnnnnnnnnnnnnnnnnnnnnnnnnnnnnnnnnnnnnnnnnnnnnnnnnnnnnnnnnnnnnnnnnnnnnnnnnnnnnnnnnnnnnnnnnnnnnnnnnnnnnnnnnnnnnnnnnnnnnnnnnnnnnnnnnnnnnnnnnnnnnnnnnnnnnnnnnnnnnnnnnnnnnnnnnnnnnnnnnnnnnnnnnnnnnnnnnnnnnnnnnnnnnnnnnnnnnnnnnnnnnnnnnnnnnnnnnnnnnnnnnnnnnnnnnnnnnnnnnnnnnnnnnnnnnnnnnnnnnnnnnnnnnnnnnnnnnnnnnnnnnnnnnnnnnnnnnnnnnnnnnnnnnnnnnnnnnnnnnnnnnnnnnnnnnnnnnnnnnnnnnnnnnnnnnnnnnnnnnnnnnnnnnnnnnnnnnnnnnnnnnnnnnnnnnnnnnnnnnnnnnnnnnnnnnnnnnnnnnnnnnnnnnnnnnnnnnnnnnnnnnnnnnnnnnnnnnnnnnnnnnnnnnnnnnnnnnnnnnnnnnnnnnnnnnnnnnnnnnnnnnnnnnnnnnnnnnnnnnnnnnnnnnnnnnnnnnnnnnnnnnnnnnnnnnnnnnnnnnnnnnnnnnnnnnnnnnnnnnnnnnnnnnnnnnnnnnnnnnnnnnnnnnnnnnnnnnnnnnnnnnnnnnnnnnnnnnnnnnnnnnnnnnnnnnnnnnnnnnnnnnnnnnnnnnnnnnnnnnnnnnnnnnnnnnnnnnnnnnnnnnnnnnnnnnnnnnnnnnnnnnnnnnnnnnnnnnnnnnnnnnnnnnnnnnnnnnnnnnnnnnnnnnnnnnnnnnnnnnnnnnnnnnnnnnnnnnnnnnnnnnnnnnnnnnnnnnnnnnnnnnnnnnnnnnnnnnnnnnnnnnnnnnnnnnnnnnnnnnnnnnnnnnnnnnnnnnnnnnnnnnnnnnnnnnnnnnnnnnnnnnnnnnnnnnnnnnnnnnnnnnnnnnnnnnnnnnnnnnnnnnnnnnnnnnnnnnnnnnnnnnnnnnnnnnnnnnnnnnnnnnnnnnnnnnnnnnnnnnnnnnnnnnnnnnnnnnnnnnnnnnnnnnnnnnnnnnnnnnnnnnnnnnnnnnnnnnnnnnnnnnnnnnnnnnnnnnnnnnnnnnnnnnnnnnnnnnnnnnnnnnnnnnnnnnnnnnnnnnnnnnnnnnnnnnnnnnnnnnnnnnnnnnnnnnnnnnnnnnnnnnnnnnnnnnnnnnnnnnnnnnnnnnnnnnnnnnnnnnnnnnnnnnnnnnnnnnnnnnnnnnnnnnnnnnnnnnnnnnnnnnnnnnnnnnnnnnnnnnnnnnnnnnnnnnnnnnnnnnnnnnnnnnnnnnnnnnnnnnnnnnnnnnnnnnnnnnnnnnnnnnnnnnnnnnnnnnnnnnnnnnnnnnnnnnnnnnnnnnnnnnnnnnnnnnnnnnnnnnnnnnnnnnnnnnnnnnnnnnnnnnnnnnnnnnnnnnnnnnnnnnnnnnnnnnnnnnnnnnnnnnnnnnnnnnnnnnnnnnnnnnnnnnnnnnnnnnnnnnnnnnnnnnnnnnnnnnnnnnnnnnnnnnnnnnnnnnnnnnnnnnnnnnnnnnnnnnnnnnnnnnnnnnnnnnnnnnnnnnnnnnnnnnnnnnnnnnnnnnnnnnnnnnnnnnnnnnnnnnnnnnnnnnnnnnnnnnnnnnnnnnnnnnnnnnnnnnnnnnnnnnnnnnnnnnnnnnnnnnnnnnnnnnnnnnnnnnnnnnnnnnnnnnnnnnnnnnnnnnnnnnnnnnnnnnnnnnnnnnnnnnnnnnnnnnnnnnnnnnnnnnnnnnnnnnnnnnnnnnnnnnnnnnnnnnnnnnnnnnnnnnnnnnnnnnnnnnnnnnnnnnnnnnnnnnnnnnnnnnnnnnnnnnnnnnnnnnnnnnnnnnnnnnnnnnnnnnnnnnnnnnnnnnnnnnnnnnnnnnnnnnnnnnnnnnnnnnnnnnnnnnnnnnnnnnnnnnnnnnnnnnnnnnnnnnnnnnnnnnnnnnnnnnnnnnnnnnnnnnnnnnnnnnnnnnnnnnnnnnnnnnnnnnnnnnnnnnnnnnnnnnnnnnnnnnnnnnnnnnnnnnnnnnnnnnnnnnnnnnnnnnnnnnnnnnnnnnnnnnnnnnnnnnnnnnnnnnnnnnnnnnnnnnnnnnnnnnnnnnnnnnnnnnnnnnnnnnnnnnnnnnnnnnnnnnnnnnnnnnnnnnnnnnnnnnnnnnnnnnnnnnnnnnnnnnnnnnnnnnnnnnnnnnnnnnnnnnnnnnnnnnnnnnnnnnnnnnnnnnnnnnnnnnnnnnnnnnnnnnnnnnnnnnnnnnnnnnnnnnnnnnnnnnnnnnnnnnnnnnnnnnnnnnnnnnnnnnnnnnnnnnnnnnnnnnnnnnnnnnnnnnnnnnnnnnnnnnnnnnnnnnnnnnnnnnnnnnnnnnnnnnnnnnnnnnnnnnnnnnnnnnnnnnnnnnnnnnnnnnnnnnnnnnnnnnnnnnnnnnnnnnnnnnnnnnnnnnnnnnnnnnnnnnnnnnnnnnnnnnnnnnnnnnnnnnnnnnnnnnnnnnnnnnnnnnnnnnnnnnnnnnnnnnnnnnnnnnnnnnnnnnnnnnnnnnnnnnnnnnnnnnnnnnnnnnnnnnnnnnnnnnnnnnnnnnnnnnnnnnnnnnnnnnnnnnnnnnnnnnnnnnnnnnnnnnnnnnnnnnnnnnnnnnnnnnnnnnnnnnnnnnnnnnnnnnnnnnnnnnnnnnnnnnnnnnnnnnnnnnnnnnnnnnnnnnnnnnnnnnnnnnnnnnnnnnnnnnnnnnnnnnnnnnnnnnnnnnnnnnnnnnnnnnnnnnnnnnnnnnnnnnnnnnnnnnnnnnnnnnnnnnnnnnnnnnnnnnnnnnnnnnnnnnnnnnnnnnnnnnnnnnnnnnnnnnnnnnnnnnnnnnnnnnnnnnnnnnnnnnnnnnnnnnnnnnnnnnnnnnnnnnnnnnnnnnnnnnnnnnnnnnnnnnnnnnnnnnnnnnnnnnnnnnnnnnnnnnnnnnnnnnnnnnnnnnnnnnnnnnnnnnnnnnnnnnnnnnnnnnnnnnnnnnnnnnnnnnnnnnnnnnnnnnnnnnnnnnnnnnnnnnnnnnnnnnnnnnnnnnnnnnnnnnnnnnnnnnnnnnnnnnnnnnnnnnnnnnnnnnnnnnnnnnnnnnnnnnnnnnnnnnnnnnnnnnnnnnnnnnnnnnnnnnnnnnnnnnnnnnnnnnnnnnnnnnnnnnnnnnnnnnnnnnnnnnnnnnnnnnnnnnnnnnnnnnnnnnnnnnnnnnnnnnnnnnnnnnnnnnnnnnnnnnnnnnnnnnnnnnnnnnnnnnnnnnnnnnnnnnnnnnnnnnnnnnnnnnnnnnnnnnnnnnnnnnnnnnnnnnnnnnnnnnnnnnnnnnnnnnnnnnnnnnnnnnnnnnnnnnnnnnnnnnnnnnnnnnnnnnnnnnnnnnnnnnnnnnnnnnnnnnnnnnnnnnnnnnnnnnnnnnnnnnnnnnnnnnnnnnnnnnnnnnnnnnnnnnnnnnnnnnnnnnnnnnnnnnnnnnnnnnnnnnnnnnnnnnnnnnnnnnnnnnnnnnnnnnnnnnnnnnnnnnnnnnnnnnnnnnnnnnnnnnnnnnnnnnnnnnnnnnnnnnnnnnnnnnnnnnnnnnnnnnnnnnnnnnnnnnnnnnnnnnnnnnnnnnnnnnnnnnnnnnnnnnnnnnnnnnnnnnnnnnnnnnnnnnnnnnnnnnnnnnnnnnnnnnnnnnnnnnnnnnnnnnnnnnnnnnnnnnnnnnnnnnnnnnnnnnnnnnnnnnnnnnnnnnnnnnnnnnnnnnnnnnnnnnnnnnnnnnnnnnnnnnnnnnnnnnnnnnnnnnnnnnnnnnnnnnnnnnnnnnnnnnnnnnnnnnnnnnnnnnnnnnnnnnnnnnnnnnnnnnnnnnnnnnnnnnnnnnnnnnnnnnnnnnnnnnnnnnnnnnnnnnnnnnnnnnnnnnnnnnnnnnnnnnnnnnnnnnnnnnnnnnnnnnnnnnnnnnnnnnnnnnnnnnnnnnnnnnnnnnnnnnnnnnnnnnnnnnnnnnnnnnnnnnnnnnnnnnnnnnnnnnnnnnnnnnnnnnnnnnnnnnnnnnnnnnnnnnnnnnnnnnnnnnnnnnnnnnnnnnnnnnnnnnnnnnnnnnnnnnnnnnnnnnnnnnnnnnnnnnnnnnnnnnnnnnnnnnnnnnnnnnnnnnnnnnnnnnnnnnnnnnnnnnnnnnnnnnnnnnnnnnnnnnnnnnnnnnnnnnnnnnnnnnnnnnnnnnnnnnnnnnnnnnnnnnnnnnnnnnnnnnnnnnnnnnnnnnnnnnnnnnnnnnnnnnnnnnnnnnnnnnnnnnnnnnnnnnnnnnnnnnnnnnnnnnnnnnnnnnnnnnnnnnnnnnnnnnnnnnnnnnnnnnnnnnnnnnnnnnnnnnnnnnnnnnnnnnnnnnnnnnnnnnnnnnnnnnnnnnnnnnnnnnnnnnnnnnnnnnnnnnnnnnnnnnnnnnnnnnnnnnnnnnnnnnnnnnnnnnnnnnnnnnnnnnnnnnnnnnnnnnnnnnnnnnnnnnnnnnnnnnnnnnnnnnnnnnnnnnnnnnnnnnnnnnnnnnnnnnnnnnnnnnnnnnnnnnnnnnnnnnnnnnnnnnnnnnnnnnnnnnnnnnnnnnnnnnnnnnnnnnnnnnnnnnnnnnnnnnnnnnnnnnnnnnnnnnnnnnnnnnnnnnnnnnnnnnnnnnnnnnnnnnnnnnnnnnnnnnnnnnnnnnnnnnnnnnnnnnnnnnnnnnnnnnnnnnnnnnnnnnnnnnnnnnnnnnnnnnnnnnnnnnnnnnnnnnnnnnnnnnnnnnnnnnnnnnnnnnnnnnnnnnnnnnnnnnnnnnnnnnnnnnnnnnnnnnnnnnnnnnnnnnnnnnnnnnnnnnnnnnnnnnnnnnnnnnnnnnnnnnnnnnnnnnnnnnnnnnnnnnnnnnnnnnnnnnnnnnnnnnnnnnnnnnnnnnnnnnnnnnnnnnnnnnnnnnnnnnnnnnnnnnnnnnnnnnnnnnnnnnnnnnnnnnnnnnnnnnnnnnnnnnnnnnnnnnnnnnnnnnnnnnnnnnnnnnnnnnnnnnnnnnnnnnnnnnnnnnnnnnnnnnnnnnnnnnnnnnnnnnnnnnnnnnnnnnnnnnnnnnnnnnnnnnnnnnnnnnnnnnnnnnnnnnnnnnnnnnnnnnnnnnnnnnnnnnnnnnnnnnnnnnnnnnnnnnnnnnnnnnnnnnnnnnnnnnnnnnnnnnnnnnnnnnnnnnnnnnnnnnnnnnnnnnnnnnnnnnnnnnnnnnnnnnnnnnnnnnnnnnnnnnnnnnnnnnnnnnnnnnnnnnnnnnnnnnnnnnnnnnnnnnnnnnnnnnnnnnnnnnnnnnnnnnnnnnnnnnnnnnnnnnnnnnnnnnnnnnnnnnnnnnnnnnnnnnnnnnnnnnnnnnnnnnnnnnnnnnnnnnnnnnnnnnnnnnnnnnnnnnnnnnnnnnnnnnnnnnnnnnnnnnnnnnnnnnnnnnnnnnnnnnnnnnnnnnnnnnnnnnnnnnnnnnnnnnnnnnnnnnnnnnnnnnnnnnnnnnnnnnnnnnnnnnnnnnnnnnnnnnnnnnnnnnnnnnnnnnnnnnnnnnnnnnnnnnnnnnnnnnnnnnnnnnnnnnnnnnnnnnnnnnnnnnnnnnnnnnnnnnnnnnnnnnnnnnnnnnnnnnnnnnnnnnnnnnnnnnnnnnnnnnnnnnnnnnnnnnnnnnnnnnnnnnnnnnnnnnnnnnnnnnnnnnnnnnnnnnnnnnnnnnnnnnnnnnnnnnnnnnnnnnnnnnnnnnnnnnnnnnnnnnnnnnnnnnnnnnnnnnnnnnnnnnnnnnnnnnnnnnnnnnnnnnnnnnnnnnnnnnnnnnnnnnnnnnnnnnnnnnnnnnnnnnnnnnnnnnnnnnnnnnnnnnnnnnnnnnnnnnnnnnnnnnnnnnnnnnnnnnnnnnnnnnnnnnnnnnnnnnnnnnnnnnnnnnnnnnnnnnnnnnnnnnnnnnnnnnnnnnnnnnnnnnnnnnnnnnnnnnnnnnnnnnnnnnnnnnnnnnnnnnnnnnnnnnnnnnnnnnnnnnnnnnnnnnnnnnnnnnnnnnnnnnnnnnnnnnnnnnnnnnnnnnnnnnnnnnnnnnnnnnnnnnnnnnnnnnnnnnnnnnnnnnnnnnnnnnnnnnnnnnnnnnnnnnnnnnnnnnnnnnnnnnnnnnnnnnnnnnnnnnnnnnnnnnnnnnnnnnnnnnnnnnnnnnnnnnnnnnnnnnnnnnnnnnnnnnnnnnnnnnnnnnnnnnnnnnnnnnnnnnnnnnnnnnnnnnnnnnnnnnnnnnnnnnnnnnnnnnnnnnnnnnnnnnnnnnnnnnnnnnnnnnnnnnnnnnnnnnnnnnnnnnnnnnnnnnnnnnnnnnnnnnnnnnnnnnnnnnnnnnnnnnnnnnnnnnnnnnnnnnnnnnnnnnnnnnnnnnnnnnnnnnnnnnnnnnnnnnnnnnnnnnnnnnnnnnnnnnnnnnnnnnnnnnnnnnnnnnnnnnnnnnnnnnnnnnnnnnnnnnnnnnnnnnnnnnnnnnnnnnnnnnnnnnnnnnnnnnnnnnnnnnnnnnnnnnnnnnnnnnnnnnnnnnnnnnnnnnnnnnnnnnnnnnnnnnnnnnnnnnnnnnnnnnnnnnnnnnnnnnnnnnnnnnnnnnnnnnnnnnnnnnnnnnnnnnnnnnnnnnnnnnnnnnnnnnnnnnnnnnnnnnnnnnnnnnnnnnnnnnnnnnnnnnnnnnnnnnnnnnnnnnnnnnnnnnnnnnnnnnnnnnnnnnnnnnnnnnnnnnnnnnnnnnnnnnnnnnnnnnnnnnnnnnnnnnnnnnnnnnnnnnnnnnnnnnnnnnnnnnnnnnnnnnnnnnnnnnnnnnnnnnnnnnnnnnnnnnnnnnnnnnnnnnnnnnnnnnnnnnnnnnnnnnnnnnnnnnnnnnnnnnnnnnnnnnnnnnnnnnnnnnnnnnnnnnnnnnnnnnnnnnnnnnnnnnnnnnnnnnnnnnnnnnnnnnnnnnnnnnnnnnnnnnnnnnnnnnnnnnnnnnnnnnnnnnnnnnnnnnnnnnnnnnnnnnnnnnnnnnnnnnnnnnnnnnnnnnnnnnnnnnnnnnnnnnnnnnnnnnnnnnnnnnnnnnnnnnnnnnnnnnnnnnnnnnnnnnnnnnnnnnnnnnnnnnnnnnnnnnnnnnnnnnnnnnnnnnnnnnnnnnnnnnnnnnnnnnnnnnnnnnnnnnnnnnnnnnnnnnnnnnnnnnnnnnnnnnnnnnnnnnnnnnnnnnnnnnnnnnnnnnnnnnnnnnnnnnnnnnnnnnnnnnnnnnnnnnnnnnnnnnnnnnnnnnnnnnnnnnnnnnnnnnnnnnnnnnnnnnnnnnnnnnnnnnnnnnnnnnnnnnnnnnnnnnnnnnnnnnnnnnnnnnnnnnnnnnnnnnnnnnnnnnnnnnnnnnnnnnnnnnnnnnnnnnnnnnnnnnnnnnnnnnnnnnnnnnnnnnnnnnnnnnnnnnnnnnnnnnnnnnnnnnnnnnnnnnnnnnnnnnnnnnnnnnnnnnnnnnnnnnnnnnnnnnnnnnnnnnnnnnnnnnnnnnnnnnnnnnnnnnnnnnnnnnnnnnnnnnnnnnnnnnnnnnnnnnnnnnnnnnnnnnnnnnnnnnnnnnnnnnnnnnnnnnnnnnnnnnnnnnnnnnnnnnnnnnnnnnnnnnnnnnnnnnnnnnnnnnnnnnnnnnnnnnnnnnnnnnnnnnnnnnnnnnnnnnnnnnnnnnnnnnnnnnnnnnnnnnnnnnnnnnnnnnnnnnnnnnnnnnnnnnnnnnnnnnnnnnnnnnnnnnnnnnnnnnnnnnnnnnnnnnnnnnnnnnnnnnnnnnnnnnnnnnnnnnnnnnnnnnnnnnnnnnnnnnnnnnnnnnnnnnnnnnnnnnnnnnnnnnnnnnnnnnnnnnnnnnnnnnnnnnnnnnnnnnnnnnnnnnnnnnnnnnnnnnnnnnnnnnnnnnnnnnnnnnnnnnnnnnnnnnnnnnnnnnnnnnnnnnnnnnnnnnnnnnnnnnnnnnnnnnnnnnnnnnnnnnnnnnnnnnnnnnnnnnnnnnnnnnnnnnnnnnnnnnnnnnnnnnnnnnnnnnnnnnnnnnnnnnnnnnnnnnnnnnnnnnnnnnnnnnnnnnnnnnnnnnnnnnnnnnnnnnnnnnnnnnnnnnnnnnnnnnnnnnnnnnnnnnnnnnnnnnnnnnnnnnnnnnnnnnnnnnnnnnnnnnnnnnnnnnnnnnnnnnnnnnnnnnnnnnnnnnnnnnnnnnnnnnnnnnnnnnnnnnnnnnnnnnnnnnnnnnnnnnnnnnnnnnnnnnnnnnnnnnnnnnnnnnnnnnnnnnnnnnnnnnnnnnnnnnnnnnnnnnnnnnnnnnnnnnnnnnnnnnnnnnnnnnnnnnnnnnnnnnnnnnnnnnnnnnnnnnnnnnnnnnnnnnnnnnnnnnnnnnnnnnnnnnnnnnnnnnnnnnnnnnnnnnnnnnnnnnnnnnnnnnnnnnnnnnnnnnnnnnnnnnnnnnnnnnnnnnnnnnnnnnnnnnnnnnnnnnnnnnnnnnnnnnnnnnnnnnnnnnnnnnnnnnnnnnnnnnnnnnnnnnnnnnnnnnnnnnnnnnnnnnnnnnnnnnnnnnnnnnnnnnnnnnnnnnnnnnnnnnnnnnnnnnnnnnnnnnnnnnnnnnnnnnnnnnnnnnnnnnnnnnnnnnnnnnnnnnnnnnnnnnnnnnnnnnnnnnnnnnnnnnnnnnnnnnnnnnnnnnnnnnnnnnnnnnnnnnnnnnnnnnnnnnnnnnnnnnnnnnnnnnnnnnnnnnnnnnnnnnnnnnnnnnnnnnnnnnnnnnnnnnnnnnnnnnnnnnnnnnnnnnnnnnnnnnnnnnnnnnnnnnnnnnnnnnnnnnnnnnnnnnnnnnnnnnnnnnnnnnnnnnnnnnnnnnnnnnnnnnnnnnnnnnnnnnnnnnnnnnnnnnnnnnnnnnnnnnnnnnnnnnnnnnnnnnnnnnnnnnnnnnnnnnnnnnnnnnnnnnnnnnnnnnnnnnnnnnnnnnnnnnnnnnnnnnnnnnnnnnnnnnnnnnnnnnnnnnnnnnnnnnnnnnnnnnnnnnnnnnnnnnnnnnnnnnnnnnnnnnnnnnnnnnnnnnnnnnnnnnnnnnnnnnnnnnnnnnnnnnnnnnnnnnnnnnnnnnnnnnnnnnnnnnnnnnnnnnnnnnnnnnnnnnnnnnnnnnnnnnnnnnnnnnnnnnnnnnnnnnnnnnnnnnnnnnnnnnnnnnnnnnnnnnnnnnnnnnnnnnnnnnnnnnnnnnnnnnnnnnnnnnnnnnnnnnnnnnnnnnnnnnnnnnnnnnnnnnnnnnnnnnnnnnnnnnnnnnnnnnnnnnnnnnnnnnnnnnnnnnnnnnnnnnnnnnnnnnnnnnnnnnnnnnnnnnnnnnnnnnnnnnnnnnnnnnnnnnnnnnnnnnnnnnnnnnnnnnnnnnnnnnnnnnnnnnnnnnnnnnnnnnnnnnnnnnnnnnnnnnnnnnnnnnnnnnnnnnnnnnnnnnnnnnnnnnnnnnnnnnnnnnnnnnnnnnnnnnnnnnnnnnnnnnnnnnnnnnnnnnnnnnnnnnnnnnnnnnnnnnnnnnnnnnnnnnnnnnnnnnnnnnnnnnnnnnnnnnnnnnnnnnnnnnnnnnnnnnnnnnnnnnnnnnnnnnnnnnnnnnnnnnnnnnnnnnnnnnnnnnnnnnnnnnnnnnnnnnnnnnnnnnnnnnnnnnnnnnnnnnnnnnnnnnnnnnnnnnnnnnnnnnnnnnnnnnnnnnnnnnnnnnnnnnnnnnnnnnnnnnnnnnnnnnnnnnnnnnnnnnnnnnnnnnnnnnnnnnnnnnnnnnnnnnnnnnnnnnnnnnnnnnnnnnnnnnnnnnnnnnnnnnnnnnnnnnnnnnnnnnnnnnnnnnnnnnnnnnnnnnnnnnnnnnnnnnnnnnnnnnnnnnnnnnnnnnnnnnnnnnnnnnnnnnnnnnnnnnnnnnnnnnnnnnnnnnnnnnnnnnnnnnnnnnnnnnnnnnnnnnnnnnnnnnnnnnnnnnnnnnnnnnnnnnnnnnnnnnnnnnnnnnnnnnnnnnnnnnnnnnnnnnnnnnnnnnnnnnnnnnnnnnnnnnnnnnnnnnnnnnnnnnnnnnnnnnnnnnnnnnnnnnnnnnnnnnnnnnnnnnnnnnnnnnnnnnnnnnnnnnnnnnnnnnnnnnnnnnnnnnnnnnnnnnnnnnnnnnnnnnnnnnnnnnnnnnnnnnnnnnnnnnnnnnnnnnnnnnnnnnnnnnnnnnnnnnnnnnnnnnnnnnnnnnnnnnnnnnnnnnnnnnnnnnnnnnnnnnnnnnnnnnnnnnnnnnnnnnnnnnnnnnnnnnnnnnnnnnnnnnnnnnnnnnnnnnnnnnnnnnnnnnnnnnnnnnnnnnnnnnnnnnnnnnnnnnnnnnnnnnnnnnnnnnnnnnnnnnnnnnnnnnnnnnnnnnnnnnnnnnnnnnnnnnnnnnnnnnnnnnnnnnnnnnnnnnnnnnnnnnnnnnnnnnnnnnnnnnnnnnnnnnnnnnnnnnnnnnnnnnnnnnnnnnnnnnnnnnnnnnnnnnnnnnnnnnnnnnnnnnnnnnnnnnnnnnnnnnnnnnnnnnnnnnnnnnnnnnnnnnnnnnnnnnnnnnnnnnnnnnnnnnnnnnnnnnnnnnnnnnnnnnnnnnnnnnnnnnnnnnnnnnnnnnnnnnnnnnnnnnnnnnnnnnnnnnnnnnnnnnnnnnnnnnnnnnnnnnnnnnnnnnnnnnnnnnnnnnnnnnnnnnnnnnnnnnnnnnnnnnnnnnnnnnnnnnnnnnnnnnnnnnnnnnnnnnnnnnnnnnnnnnnnnnnnnnnnnnnnnnnnnnnnnnnnnnnnnnnnnnnnnnnnnnnnnnnnnnnnnnnnnnnnnnnnnnnnnnnnnnnnnnnnnnnnnnnnnnnnnnnnnnnnnnnnnnnnnnnnnnnnnnnnnnnnnnnnnnnnnnnnnnnnnnnnnnnnnnnnnnnnnnnnnnnnnnnnnnnnnnnnnnnnnnnnnnnnnnnnnnnnnnnnnnnnnnnnnnnnnnnnnnnnnnnnnnnnnnnnnnnnnnnnnnnnnnnnnnnnnnnnnnnnnnnnnnnnnnnnnnnnnnnnnnnnnnnnnnnnnnnnnnnnnnnnnnnnnnnnnnnnnnnnnnnnnnnnnnnnnnnnnnnnnnnnnnnnnnnnnnnnnnnnnnnnnnnnnnnnnnnnnnnnnnnnnnnnnnnnnnnnnnnnnnnnnnnnnnnnnnnnnnnnnnnnnnnnnnnnnnnnnnnnnnnnnnnnnnnnnnnnnnnnnnnnnnnnnnnnnnnnnnnnnnnnnnnnnnnnnnnnnnnnnnnnnnnnnnnnnnnnnnnnnnnnnnnnnnnnnnnnnnnnnnnnnnnnnnnnnnnnnnnnnnnnnnnnnnnnnnnnnnnnnnnnnnnnnnnnnnnnnnnnnnnnnnnnnnnnnnnnnnnnnnnnnnnnnnnnnnnnnnnnnnnnnnnnnnnnnnnnnnnnnnnnnnnnnnnnnnnnnnnnnnnnnnnnnnnnnnnnnnnnnnnnnnnnnnnnnnnnnnnnnnnnnnnnnnnnnnnnnnnnnnnnnnnnnnnnnnnnnnnnnnnnnnnnnnnnnnnnnnnnnnnnnnnnnnnnnnnnnnnnnnnnnnnnnnnnnnnnnnnnnnnnnnnnnnnnnnnnnnnnnnnnnnnnnnnnnnnnnnnnnnnnnnnnnnnnnnnnnnnnnnnnnnnnnnnnnnnnnnnnnnnnnnnnnnnnnnnnnnnnnnnnnnnnnnnnnnnnnnnnnnnnnnnnnnnnnnnnnnnnnnnnnnnnnnnnnnnnnnnnnnnnnnnnnnnnnnnnnnnnnnnnnnnnnnnnnnnnnnnnnnnnnnnnnnnnnnnnnnnnnnnnnnnnnnnnnnnnnnnnnnnnnnnnnnnnnnnnnnnnnnnnnnnnnnnnnnnnnnnnnnnnnnnnnnnnnnnnnnnnnnnnnnnnnnnnnnnnnnnnnnnnnnnnnnnnnnnnnnnnnnnnnnnnnnnnnnnnnnnnnnnnnnnnnnnnnnnnnnnnnnnnnnnnnnnnnnnnnnnnnnnnnnnnnnnnnnnnnnnnnnnnnnnnnnnnnnnnnnnnnnnnnnnnnnnnnnnnnnnnnnnnnnnnnnnnnnnnnnnnnnnnnnnnnnnnnnnnnnnnnnnnnnnnnnnnnnnnnnnnnnnnnnnnnnnnnnnnnnnnnnnnnnnnnnnnnnnnnnnnnnnnnnnnnnnnnnnnnnnnnnnnnnnnnnnnnnnnnnnnnnnnnnnnnnnnnnnnnnnnnnnnnnnnnnnnnnnnnnnnnnnnnnnnnnnnnnnnnnnnnnnnnnnnnnnnnnnnnnnnnnnnnnnnnnnnnnnnnnnnnnnnnnnnnnnnnnnnnnnnnnnnnnnnnnnnnnnnnnnnnnnnnnnnnnnnnnnnnnnnnnnnnnnnnnnnnnnnnnnnnnnnnnnnnnnnnnnnnnnnnnnnnnnnnnnnnnnnnnnnnnnnnnnnnnnnnnnnnnnnnnnnnnnnnnnnnnnnnnnnnnnnnnnnnnnnnnnnnnnnnnnnnnnnnnnnnnnnnnnnnnnnnnnnnnnnnnnnnnnnnnnnnnnnnnnnnnnnnnnnnnnnnnnnnnnnnnnnnnnnnnnnnnnnnnnnnnnnnnnnnnnnnnnnnnnnnnnnnnnnnnnnnnnnnnnnnnnnnnnnnnnnnnnnnnnnnnnnnnnnnnnnnnnnnnnnnnnnnnnnnnnnnnnnnnnnnnnnnnnnnnnnnnnnnnnnnnnnnnnnnnnnnnnnnnnnnnnnnnnnnnnnnnnnnnnnnnnnnnnnnnnnnnnnnnnnnnnnnnnnnnnnnnnnnnnnnnnnnnnnnnnnnnnnnnnnnnnnnnnnnnnnnnnnnnnnnnnnnnnnnnnnnnnnnnnnnnnnnnnnnnnnnnnnnnnnnnnnnnnnnnnnnnnnnnnnnnnnnnnnnnnnnnnnnnnnnnnnnnnnnnnnnnnnnnnnnnnnnnnnnnnnnnnnnnnnnnnnnnnnnnnnnnnnnnnnnnnnnnnnnnnnnnnnnnnnnnnnnnnnnnnnnnnnnnnnnnnnnnnnnnnnnnnnnnnnnnnnnnnnnnnnnnnnnnnnnnnnnnnnnnnnnnnnnnnnnnnnnnnnnnnnnnnnnnnnnnnnnnnnnnnnnnnnnnnnnnnnnnnnnnnnnnnnnnnnnnnnnnnnnnnnnnnnnnnnnnnnnnnnnnnnnnnnnnnnnnnnnnnnnnnnnnnnnnnnnnnnnnnnnnnnnnnnnnnnnnnnnnnnnnnnnnnnnnnnnnnnnnnnnnnnnnnnnnnnnnnnnnnnnnnnnnnnnnnnnnnnnnnnnnnnnnnnnnnnnnnnnnnnnnnnnnnnnnnnnnnnnnnnnnnnnnnnnnnnnnnnnnnnnnnnnnnnnnnnnnnnnnnnnnnnnnnnnnnnnnnnnnnnnnnnnnnnnnnnnnnnnnnnnnnnnnnnnnnnnnnnnnnnnnnnnnnnnnnnnnnnnnnnnnnnnnnnnnnnnnnnnnnnnnnnnnnnnnnnnnnnnnnnnnnnnnnnnnnnnnnnnnnnnnnnnnnnnnnnnnnnnnnnnnnnnnnnnnnnnnnnnnnnnnnnnnnnnnnnnnnnnnnnnnnnnnnnnnnnnnnnnnnnnnnnnnnnnnnnnnnnnnnnnnnnnnnnnnnnnnnnnnnnnnnnnnnnnnnnnnnnnnnnnnnnnnnnnnnnnnnnnnnnnnnnnnnnnnnnnnnnnnnnnnnnnnnnnnnnnnnnnnnnnnnnnnnnnnnnnnnnnnnnnnnnnnnnnnnnnnnnnnnnnnnnnnnnnnnnnnnnnnnnnnnnnnnnnnnnnnnnnnnnnnnnnnnnnnnnnnnnnnnnnnnnnnnnnnnnnnnnnnnnnnnnnnnnnnnnnnnnnnnnnnnnnnnnnnnnnnnnnnnnnnnnnnnnnnnnnnnnnnnnnnnnnnnnnnnnnnnnnnnnnnnnnnnnnnnnnnnnnnnnnnnnnnnnnnnnnnnnnnnnnnnnnnnnnnnnnnnnnnnnnnnnnnnnnnnnnnnnnnnnnnnnnnnnnnnnnnnnnnnnnnnnnnnnnnnnnnnnnnnnnnnnnnnnnnnnnnnnnnnnnnnnnnnnnnnnnnnnnnnnnnnnnnnnnnnnnnnnnnnnnnnnnnnnnnnnnnnnnnnnnnnnnnnnnnnnnnnnnnnnnnnnnnnnnnnnnnnnnnnnnnnnnnnnnnnnnnnnnnnnnnnnnnnnnnnnnnnnnnnnnnnnnnnnnnnnnnnnnnnnnnnnnnnnnnnnnnnnnnnnnnnnnnnnnnnnnnnnnnnnnnnnnnnnnnnnnnnnnnnnnnnnnnnnnnnnnnnnnnnnnnnnnnnnnnnnnnnnnnnnnnnnnnnnnnnnnnnnnnnnnnnnnnnnnnnnnnnnnnnnnnnnnnnnnnnnnnnnnnnnnnnnnnnnnnnnnnnnnnnnnnnnnnnnnnnnnnnnnnnnnnnnnnnnnnnnnnnnnnnnnnnnnnnnnnnnnnnnnnnnnnnnnnnnnnnnnnnnnnnnnnnnnnnnnnnnnnnnnnnnnnnnnnnnnnnnnnnnnnnnnnnnnnnnnnnnnnnnnnnnnnnnnnnnnnnnnnnnnnnnnnnnnnnnnnnnnnnnnnnnnnnnnnnnnnnnnnnnnnnnnnnnnnnnnnnnnnnnnnnnnnnnnnnnnnnnnnnnnnnnnnnnnnnnnnnnnnnnnnnnnnnnnnnnnnnnnnnnnnnnnnnnnnnnnnnnnnnnnnnnnnnnnnnnnnnnnnnnnnnnnnnnnnnnnnnnnnnnnnnnnnnnnnnnnnnnnnnnnnnnnnnnnnnnnnnnnnnnnnnnnnnnnnnnnnnnnnnnnnnnnnnnnnnnnnnnnnnnnnnnnnnnnnnnnnnnnnnnnnnnnnnnnnnnnnnnnnnnnnnnnnnnnnnnnnnnnnnnnnnnnnnnnnnnnnnnnnnnnnnnnnnnnnnnnnnnnnnnnnnnnnnnnnnnnnnnnnnnnnnnnnnnnnnnnnnnnnnnnnnnnnnnnnnnnnnnnnnnnnnnnnnnnnnnnnnnnnnnnnnnnnnnnnnnnnnnnnnnnnnnnnnnnnnnnnnnnnnnnnnnnnnnnnnnnnnnnnnnnnnnnnnnnnnnnnnnnnnnnnnnnnnnnnnnnnnnnnnnnnnnnnnnnnnnnnnnnnnnnnnnnnnnnnnnnnnnnnnnnnnnnnnnnnnnnnnnnnnnnnnnnnnnnnnnnnnnnnnnnnnnnnnnnnnnnnnnnnnnnnnnnnnnnnnnnnnnnnnnnnnnnnnnnnnnnnnnnnnnnnnnnnnnnnnnnnnnnnnnnnnnnnnnnnnnnnnnnnnnnnnnnnnnnnnnnnnnnnnnnnnnnnnnnnnnnnnnnnnnnnnnnnnnnnnnnnnnnnnnnnnnnnnnnnnnnnnnnnnnnnnnnnnnnnnnnnnnnnnnnnnnnnnnnnnnnnnnnnnnnnnnnnnnnnnnnnnnnnnnnnnnnnnnnnnnnnnnnnnnnnnnnnnnnnnnnnnnnnnnnnnnnnnnnnnnnnnnnnnnnnnnnnnnnnnnnnnnnnnnnnnnnnnnnnnnnnnnnnnnnnnnnnnnnnnnnnnnnnnnnnnnnnnnnnnnnnnnnnnnnnnnnnnnnnnnnnnnnnnnnnnnnnnnnnnnnnnnnnnnnnnnnnnnnnnnnnnnnnnnnnnnnnnnnnnnnnnnnnnnnnnnnnnnnnnnnnnnnnnnnnnnnnnnnnnnnnnnnnnnnnnnnnnnnnnnnnnnnnnnnnnnnnnnnnnnnnnnnnnnnnnnnnnnnnnnnnnnnnnnnnnnnnnnnnnnnnnnnnnnnnnnnnnnnnnnnnnnnnnnnnnnnnnnnnnnnnnnnnnnnnnnnnnnnnnnnnnnnnnnnnnnnnnnnnnnnnnnnnnnnnnnnnnnnnnnnnnnnnnnnnnnnnnnnnnnnnnnnnnnnnnnnnnnnnnnnnnnnnnnnnnnnnnnnnnnnnnnnnnnnnnnnnnnnnnnnnnnnnnnnnnnnnnnnnnnnnnnnnnnnnnnnnnnnnnnnnnnnnnnnnnnnnnnnnnnnnnnnnnnnnnnnnnnnnnnnnnnnnnnnnnnnnnnnnnnnnnnnnnnnnnnnnnnnnnnnnnnnnnnnnnnnnnnnnnnnnnnnnnnnnnnnnnnnnnnnnnnnnnnnnnnnnnnnnnnnnnnnnnnnnnnnnnnnnnnnnnnnnnnnnnnnnnnnnnnnnnnnnnnnnnnnnnnnnnnnnnnnnnnnnnnnnnnnnnnnnnnnnnnnnnnnnnnnnnnnnnnnnnnnnnnnnnnnnnnnnnnnnnnnnnnnnnnnnnnnnnnnnnnnnnnnnnnnnnnnnnnnnnnnnnnnnnnnnnnnnnnnnnnnnnnnnnnnnnnnnnnnnnnnnnnnnnnnnnnnnnnnnnnnnnnnnnnnnnnnnnnnnnnnnnnnnnnnnnnnnnnnnnnnnnnnnnnnnnnnnnnnnnnnnnnnnnnnnnnnnnnnnnnnnnnnnnnnnnnnnnnnnnnnnnnnnnnnnnnnnnnnnnnnnnnnnnnnnnnnnnnnnnnnnnnnnnnnnnnnnnnnnnnnnnnnnnnnnnnnnnnnnnnnnnnnnnnnnnnnnnnnnnnnnnnnnnnnnnnnnnnnnnnnnnnnnnnnnnnnnnnnnnnnnnnnnnnnnnnnnnnnnnnnnnnnnnnnnnnnnnnnnnnnnnnnnnnnnnnnnnnnnnnnnnnnnnnnnnnnnnnnnnnnnnnnnnnnnnnnnnnnnnnnnnnnnnnnnnnnnnnnnnnnnnnnnnnnnnnnnnnnnnnnnnnnnnnnnnnnnnnnnnnnnnnnnnnnnnnnnnnnnnnnnnnnnnnnnnnnnnnnnnnnnnnnnnnnnnnnnnnnnnnnnnnnnnnnnnnnnnnnnnnnnnnnnnnnnnnnnnnnnnnnnnnnnnnnnnnnnnnnnnnnnnnnnnnnnnnnnnnnnnnnnnnnnnnnnnnnnnnnnnnnnnnnnnnnnnnnnnnnnnnnnnnnnnnnnnnnnnnnnnnnnnnnnnnnnnnnnnnnnnnnnnnnnnnnnnnnnnnnnnnnnnnnnnnnnnnnnnnnnnnnnnnnnnnnnnnnnnnnnnnnnnnnnnnnnnnnnnnnnnnnnnnnnnnnnnnnnnnnnnnnnnnnnnnnnnnnnnnnnnnnnnnnnnnnnnnnnnnnnnnnnnnnnnnnnnnnnnnnnnnnnnnnnnnnnnnnnnnnnnnnnnnnnnnnnnnnnnnnnnnnnnnnnnnnnnnnnnnnnnnnnnnnnnnnnnnnnnnnnnnnnnnnnnnnnnnnnnnnnnnnnnnnnnnnnnnnnnnnnnnnnnnnnnnnnnnnnnnnnnnnnnnnnnnnnnnnnnnnnnnnnnnnnnnnnnnnnnnnnnnnnnnnnnnnnnnnnnnnnnnnnnnnnnnnnnnnnnnnnnnnnnnnnnnnnnnnnnnnnnnnnnnnnnnnnnnnnnnnnnnnnnnnnnnnnnnnnnnnnnnnnnnnnnnnnnnnnnnnnnnnnnnnnnnnnnnnnnnnnnnnnnnnnnnnnnnnnnnnnnnnnnnnnnnnnnnnnnnnnnnnnnnnnnnnnnnnnnnnnnnnnnnnnnnnnnnnnnnnnnnnnnnnnnnnnnnnnnnnnnnnnnnnnnnnnnnnnnnnnnnnnnnnnnnnnnnnnnnnnnnnnnnnnnnnnnnnnnnnnnnnnnnnnnnnnnnnnnnnnnnnnnnnnnnnnnnnnnnnnnnnnnnnnnnnnnnnnnnnnnnnnnnnnnnnnnnnnnnnnnnnnnnnnnnnnnnnnnnnnnnnnnnnnnnnnnnnnnnnnnnnnnnnnnnnnnnnnnnnnnnnnnnnnnnnnnnnnnnnnnnnnnnnnnnnnnnnnnnnnnnnnnnnnnnnnnnnnnnnnnnnnnnnnnnnnnnnnnnnnnnnnnnnnnnnnnnnnnnnnnnnnnnnnnnnnnnnnnnnnnnnnnnnnnnnnnnnnnnnnnnnnnnnnnnnnnnnnnnnnnnnnnnnnnnnnnnnnnnnnnnnnnnnnnnnnnnnnnnnnnnnnnnnnnnnnnnnnnnnnnnnnnnnnnnnnnnnnnnnnnnnnnnnnnnnnnnnnnnnnnnnnnnnnnnnnnnnnnnnnnnnnnnnnnnnnnnnnnnnnnnnnnnnnnnnnnnnnnnnnnnnnnnnnnnnnnnnnnnnnnnnnnnnnnnnnnnnnnnnnnnnnnnnnnnnnnnnnnnnnnnnnnnnnnnnnnnnnnnnnnnnnnnnnnnnnnnnnnnnnnnnnnnnnnnnnnnnnnnnnnnnnnnnnnnnnnnnnnnnnnnnnnnnnnnnnnnnnnnnnnnnnnnnnnnnnnnnnnnnnnnnnnnnnnnnnnnnnnnnnnnnnnnnnnnnnnnnnnnnnnnnnnnnnnnnnnnnnnnnnnnnnnnnnnnnnnnnnnnnnnnnnnnnnnnnnnnnnnnnnnnnnnnnnnnnnnnnnnnnnnnnnnnnnnnnnnnnnnnnnnnnnnnnnnnnnnnnnnnnnnnnnnnnnnnnnnnnnnnnnnnnnnnnnnnnnnnnnnnnnnnnnnnnnnnnnnnnnnnnnnnnnnnnnnnnnnnnnnnnnnnnnnnnnnnnnnnnnnnnnnnnnnnnnnnnnnnnnnnnnnnnnnnnnnnnnnnnnnnnnnnnnnnnnnnnnnnnnnnnnnnnnnnnnnnnnnnnnnnnnnnnnnnnnnnnnnnnnnnnnnnnnnnnnnnnnnnnnnnnnnnnnnnnnnnnnnnnnnnnnnnnnnnnnnnnnnnnnnnnnnnnnnnnnnnnnnnnnnnnnnnnnnnnnnnnnnnnnnnnnnnnnnnnnnnnnnnnnnnnnnnnnnnnnnnnnnnnnnnnnnnnnnnnnnnnnnnnnnnnnnnnnnnnnnnnnnnnnnnnnnnnnnnnnnnnnnnnnnnnnnnnnnnnnnnnnnnnnnnnnnnnnnnnnnnnnnnnnnnnnnnnnnnnnnnnnnnnnnnnnnnnnnnnnnnnnnnnnnnnnnnnnnnnnnnnnnnnnnnnnnnnnnnnnnnnnnnnnnnnnnnnnnnnnnnnnnnnnnnnnnnnnnnnnnnnnnnnnnnnnnnnnnnnnnnnnnnnnnnnnnnnnnnnnnnnnnnnnnnnnnnnnnnnnnnnnnnnnnnnnnnnnnnnnnnnnnnnnnnnnnnnnnnnnnnnnnnnnnnnnnnnnnnnnnnnnnnnnnnnnnnnnnnnnnnnnnnnnnnnnnnnnnnnnnnnnnnnnnnnnnnnnnnnnnnnnnnnnnnnnnnnnnnnnnnnnnnnnnnnnnnnnnnnnnnnnnnnnnnnnnnnnnnnnnnnnnnnnnnnnnnnnnnnnnnnnnnnnnnnnnnnnnnnnnnnnnnnnnnnnnnnnnnnnnnnnnnnnnnnnnnnnnnnnnnnnnnnnnnnnnnnnnnnnnnnnnnnnnnnnnnnnnnnnnnnnnnnnnnnnnnnnnnnnnnnnnnnnnnnnnnnnnnnnnnnnnnnnnnnnnnnnnnnnnnnnnnnnnnnnnnnnnnnnnnnnnnnnnnnnnnnnnnnnnnnnnnnnnnnnnnnnnnnnnnnnnnnnnnnnnnnnnnnnnnnnnnnnnnnnnnnnnnnnnnnnnnnnnnnnnnnnnnnnnnnnnnnnnnnnnnnnnnnnnnnnnnnnnnnnnnnnnnnnnnnnnnnnnnnnnnnnnnnnnnnnnnnnnnnnnnnnnnnnnnnnnnnnnnnnnnnnnnnnnnnnnnnnnnnnnnnnnnnnnnnnnnnnnnnnnnnnnnnnnnnnnnnnnnnnnnnnnnnnnnnnnnnnnnnnnnnnnnnnnnnnnnnnnnnnnnnnnnnnnnnnnnnnnnnnnnnnnnnnnnnnnnnnnnnnnnnnnnnnnnnnnnnnnnnnnnnnnnnnnnnnnnnnnnnnnnnnnnnnnnnnnnnnnnnnnnnnnnnnnnnnnnnnnnnnnnnnnnnnnnnnnnnnnnnnnnnnnnnnnnnnnnnnnnnnnnnnnnnnnnnnnnnnnnnnnnnnnnnnnnnnnnnnnnnnnnnnnnnnnnnnnnnnnnnnnnnnnnnnnnnnnnnnnnnnnnnnnnnnnnnnnnnnnnnnnnnnnnnnnnnnnnnnnnnnnnnnnnnnnnnnnnnnnnnnnnnnnnnnnnnnnnnnnnnnnnnnnnnnnnnnnnnnnnnnnnnnnnnnnnnnnnnnnnnnnnnnnnnnnnnnnnnnnnnnnnnnnnnnnnnnnnnnnnnnnnnnnnnnnnnnnnnnnnnnnnnnnnnnnnnnnnnnnnnnnnnnnnnnnnnnnnnnnnnnnnnnnnnnnnnnnnnnnnnnnnnnnnnnnnnnnnnnnnnnnnnnnnnnnnnnnnnnnnnnnnnnnnnnnnnnnnnnnnnnnnnnnnnnnnnnnnnnnnnnnnnnnnnnnnnnnnnnnnnnnnnnnnnnnnnnnnnnnnnnnnnnnnnnnnnnnnnnnnnnnnnnnnnnnnnnnnnnnnnnnnnnnnnnnnnnnnnnnnnnnnnnnnnnnnnnnnnnnnnnnnnnnnnnnnnnnnnnnnnnnnnnnnnnnnnnnnnnnnnnnnnnnnnnnnnnnnnnnnnnnnnnnnnnnnnnnnnnnnnnnnnnnnnnnnnnnnnnnnnnnnnnnnnnnnnnnnnnnnnnnnnnnnnnnnnnnnnnnnnnnnnnnnnnnnnnnnnnnnnnnnnnnnnnnnnnnnnnnnnnnnnnnnnnnnnnnnnnnnnnnnnnnnnnnnnnnnnnnnnnnnnnnnnnnnnnnnnnnnnnnnnnnnnnnnnnnnnnnnnnnnnnnnnnnnnnnnnnnnnnnnnnnnnnnnnnnnnnnnnnnnnnnnnnnnnnnnnnnnnnnnnnnnnnnnnnnnnnnnnnnnnnnnnnnnnnnnnnnnnnnnnnnnnnnnnnnnnnnnnnnnnnnnnnnnnnnnnnnnnnnnnnnnnnnnnnnnnnnnnnnnnnnnnnnnnnnnnnnnnnnnnnnnnnnnnnnnnnnnnnnnnnnnnnnnnnnnnnnnnnnnnnnnnnnnnnnnnnnnnnnnnnnnnnnnnnnnnnnnnnnnnnnnnnnnnnnnnnnnnnnnnnnnnnnnnnnnnnnnnnnnnnnnnnnnnnnnnnnnnnnnnnnnnnnnnnnnnnnnnnnnnnnnnnnnnnnnnnnnnnnnnnnnnnnnnnnnnnnnnnnnnnnnnnnnnnnnnnnnnnnnnnnnnnnnnnnnnnnnnnnnnnnnnnnnnnnnnnnnnnnnnnnnnnnnnnnnnnnnnnnnnnnnnnnnnnnnnnnnnnnnnnnnnnnnnnnnnnnnnnnnnnnnnnnnnnnnnnnnnnnnnnnnnnnnnnnnnnnnnnnnnnnnnnnnnnnnnnnnnnnnnnnnnnnnnnnnnnnnnnnnnnnnnnnnnnnnnnnnnnnnnnnnnnnnnnnnnnnnnnnnnnnnnnnnnnnnnnnnnnnnnnnnnnnnnnnnnnnnnnnnnnnnnnnnnnnnnnnnnnnnnnnnnnnnnnnnnnnnnnnnnnnnnnnnnnnnnnnnnnnnnnnnnnnnnnnnnnnnnnnnnnnnnnnnnnnnnnnnnnnnnnnnnnnnnnnnnnnnnnnnnnnnnnnnnnnnnnnnnnnnnnnnnnnnnnnnnnnnnnnnnnnnnnnnnnnnnnnnnnnnnnnnnnnnnnnnnnnnnnnnnnnnnnnnnnnnnnnnnnnnnnnnnnnnnnnnnnnnnnnnnnnnnnnnnnnnnnnnnnnnnnnnnnnnnnnnnnnnnnnnnnnnnnnnnnnnnnnnnnnnnnnnnnnnnnnnnnnnnnnnnnnnnnnnnnnnnnnnnnnnnnnnnnnnnnnnnnnnnnnnnnnnnnnnnnnnnnnnnnnnnnnnnnnnnnnnnnnnnnnnnnnnnnnnnnnnnnnnnnnnnnnnnnnnnnnnnnnnnnnnnnnnnnnnnnnnnnnnnnnnnnnnnnnnnnnnnnnnnnnnnnnnnnnnnnnnnnnnnnnnnnnnnnnnnnnnnnnnnnnnnnnnnnnnnnnnnnnnnnnnnnnnnnnnnnnnnnnnnnnnnnnnnnnnnnnnnnnnnnnnnnnnnnnnnnnnnnnnnnnnnnnnnnnnnnnnnnnnnnnnnnnnnnnnnnnnnnnnnnnnnnnnnnnnnnnnnnnnnnnnnnnnnnnnnnnnnnnnnnnnnnnnnnnnnnnnnnnnnnnnnnnnnnnnnnnnnnnnnnnnnnnnnnnnnnnnnnnnnnnnnnnnnnnnnnnnnnnnnnnnnnnnnnnnnnnnnnnnnnnnnnnnnnnnnnnnnnnnnnnnnnnnnnnnnnnnnnnnnnnnnnnnnnnnnnnnnnnnnnnnnnnnnnnnnnnnnnnnnnnnnnnnnnnnnnnnnnnnnnnnnnnnnnnnnnnnnnnnnnnnnnnnnnnnnnnnnnnnnnnnnnnnnnnnnnnnnnnnnnnnnnnnnnnnnnnnnnnnnnnnnnnnnnnnnnnnnnnnnnnnnnnnnnnnnnnnnnnnnnnnnnnnnnnnnnnnnnnnnnnnnnnnnnnnnnnnnnnnnnnnnnnnnnnnnnnnnnnnnnnnnnnnnnnnnnnnnnnnnnnnnnnnnnnnnnnnnnnnnnnnnnnnnnnnnnnnnnnnnnnnnnnnnnnnnnnnnnnnnnnnnnnnnnnnnnnnnnnnnnnnnnnnnnnnnnnnnnnnnnnnnnnnnnnnnnnnnnnnnnnnnnnnnnnnnnnnnnnnnnnnnnnnnnnnnnnnnnnnnnnnnnnnnnnnnnnnnnnnnnnnnnnnnnnnnnnnnnnnnnnnnnnnnnnnnnnnnnnnnnnnnnnnnnnnnnnnnnnnnnnnnnnnnnnnnnnnnnnnnnnnnnnnnnnnnnnnnnnnnnnnnnnnnnnnnnnnnnnnnnnnnnnnnnnnnnnnnnnnnnnnnnnnnnnnnnnnnnnnnnnnnnnnnnnnnnnnnnnnnnnnnnnnnnnnnnnnnnnnnnnnnnnnnnnnnnnnnnnnnnnnnnnnnnnnnnnnnnnnnnnnnnnnnnnnnnnnnnnnnnnnnnnnnnnnnnnnnnnnnnnnnnnnnnnnnnnnnnnnnnnnnnnnnnnnnnnnnnnnnnnnnnnnnnnnnnnnnnnnnnnnnnnnnnnnnnnnnnnnnnnnnnnnnnnnnnnnnnnnnnnnnnnnnnnnnnnnnnnnnnnnnnnnnnnnnnnnnnnnnnnnnnnnnnnnnnnnnnnnnnnnnnnnnnnnnnnnnnnnnnnnnnnnnnnnnnnnnnnnnnnnnnnnnnnnnnnnnnnnnnnnnnnnnnnnnnnnnnnnnnnnnnnnnnnnnnnnnnnnnnnnnnnnnnnnnnnnnnnnnnnnnnnnnnnnnnnnnnnnnnnnnnnnnnnnnnnnnnnnnnnnnnnnnnnnnnnnnnnnnnnnnnnnnnnnnnnnnnnnnnnnnnnnnnnnnnnnnnnnnnnnnnnnnnnnnnnnnnnnnnnnnnnnnnnnnnnnnnnnnnnnnnnnnnnnnnnnnnnnnnnnnnnnnnnnnnnnnnnnnnnnnnnnnnnnnnnnnnnnnnnnnnnnnnnnnnnnnnnnnnnnnnnnnnnnnnnnnnnnnnnnnnnnnnnnnnnnnnnnnnnnnnnnnnnnnnnnnnnnnnnnnnnnnnnnnnnnnnnnnnnnnnnnnnnnnnnnnnnnnnnnnnnnnnnnnnnnnnnnnnnnnnnnnnnnnnnnnnnnnnnnnnnnnnnnnnnnnnnnnnnnnnnnnnnnnnnnnnnnnnnnnnnnnnnnnnnnnnnnnnnnnnnnnnnnnnnnnnnnnnnnnnnnnnnnnnnnnnnnnnnnnnnnnnnnnnnnnnnnnnnnnnnnnnnnnnnnnnnnnnnnnnnnnnnnnnnnnnnnnnnnnnnnnnnnnnnnnnnnnnnnnnnnnnnnnnnnnnnnnnnnnnnnnnnnnnnnnnnnnnnnnnnnnnnnnnnnnnnnnnnnnnnnnnnnnnnnnnnnnnnnnnnnnnnnnnnnnnnnnnnnnnnnnnnnnnnnnnnnnnnnnnnnnnnnnnnnnnnnnnnnnnnnnnnnnnnnnnnnnnnnnnnnnnnnnnnnnnnnnnnnnnnnnnnnnnnnnnnnnnnnnnnnnnnnnnnnnnnnnnnnnnnnnnnnnnnnnnnnnnnnnnnnnnnnnnnnnnnnnnnnnnnnnnnnnnnnnnnnnnnnnnnnnnnnnnnnnnnnnnnnnnnnnnnnnnnnnnnnnnnnnnnnnnnnnnnnnnnnnnnnnnnnnnnnnnnnnnnnnnnnnnnnnnnnnnnnnnnnnnnnnnnnnnnnnnnnnnnnnnnnnnnnnnnnnnnnnnnnnnnnnnnnnnnnnnnnnnnnnnnnnnnnnnnnnnnnnnnnnnnnnnnnnnnnnnnnnnnnnnnnnnnnnnnnnnnnnnnnnnnnnnnnnnnnnnnnnnnnnnnnnnnnnnnnnnnnnnnnnnnnnnnnnnnnnnnnnnnnnnnnnnnnnnnnnnnnnnnnnnnnnnnnnnnnnnnnnnnnnnnnnnnnnnnnnnnnnnnnnnnnnnnnnnnnnnnnnnnnnnnnnnnnnnnnnnnnnnnnnnnnnnnnnnnnnnnnnnnnnnnnnnnnnnnnnnnnnnnnnnnnnnnnnnnnnnnnnnnnnnnnnnnnnnnnnnnnnnnnnnnnnnnnnnnnnnnnnnnnnnnnnnnnnnnnnnnnnnnnnnnnnnnnnnnnnnnnnnnnnnnnnnnnnnnnnnnnnnnnnnnnnnnnnnnnnnnnnnnnnnnnnnnnnnnnnnnnnnnnnnnnnnnnnnnnnnnnnnnnnnnnnnnnnnnnnnnnnnnnnnnnnnnnnnnnnnnnnnnnnnnnnnnnnnnnnnnnnnnnnnnnnnnnnnnnnnnnnnnnnnnnnnnnnnnnnnnnnnnnnnnnnnnnnnnnnnnnnnnnnnnnnnnnnnnnnnnnnnnnnnnnnnnnnnnnnnnnnnnnnnnnnnnnnnnnnnnnnnnnnnnnnnnnnnnnnnnnnnnnnnnnnnnnnnnnnnnnnnnnnnnnnnnnnnnnnnnnnnnnnnnnnnnnnnnnnnnnnnnnnnnnnnnnnnnnnnnnnnnnnnnnnnnnnnnnnnnnnnnnnnnnnnnnnnnnnnnnnnnnnnnnnnnnnnnnnnnnnnnnnnnnnnnnnnnnnnnnnnnnnnnnnnnnnnnnnnnnnnnnnnnnnnnnnnnnnnnnnnnnnnnnnnnnnnnnnnnnnnnnnnnnnnnnnnnnnnnnnnnnnnnnnnnnnnnnnnnnnnnnnnnnnnnnnnnnnnnnnnnnnnnnnnnnnnnnnnnnnnnnnnnnnnnnnnnnnnnnnnnnnnnnnnnnnnnnnnnnnnnnnnnnnnnnnnnnnnnnnnnnnnnnnnnnnnnnnnnnnnnnnnnnnnnnnnnnnnnnnnnnnnnnnnnnnnnnnnnnnnnnnnnnnnnnnnnnnnnnnnnnnnnnnnnnnnnnnnnnnnnnnnnnnnnnnnnnnnnnnnnnnnnnnnnnnnnnnnnnnnnnnnnnnnnnnnnnnnnnnnnnnnnnnnnnnnnnnnnnnnnnnnnnnnnnnnnnnnnnnnnnnnnnnnnnnnnnnnnnnnnnnnnnnnnnnnnnnnnnnnnnnnnnnnnnnnnnnnnnnnnnnnnnnnnnnnnnnnnnnnnnnnnnnnnnnnnnnnnnnnnnnnnnnnnnnnnnnnnnnnnnnnnnnnnnnnnnnnnnnnnnnnnnnnnnnnnnnnnnnnnnnnnnnnnnnnnnnnnnnnnnnnnnnnnnnnnnnnnnnnnnnnnnnnnnnnnnnnnnnnnnnnnnnnnnnnnnnnnnnnnnnnnnnnnnnnnnnnnnnnnnnnnnnnnnnnnnnnnnnnnnnnnnnnnnnnnnnnnnnnnnnnnnnnnnnnnnnnnnnnnnnnnnnnnnnnnnnnnnnnnnnnnnnnnnnnnnnnnnnnnnnnnnnnnnnnnnnnnnnnnnnnnnnnnnnnnnnnnnnnnnnnnnnnnnnnnnnnnnnnnnnnnnnnnnnnnnnnnnnnnnnnnnnnnnnnnnnnnnnnnnnnnnnnnnnnnnnnnnnnnnnnnnnnnnnnnnnnnnnnnnnnnnnnnnnnnnnnnnnnnnnnnnnnnnnnnnnnnnnnnnnnnnnnnnnnnnnnnnnnnnnnnnnnnnnnnnnnnnnnnnnnnnnnnnnnnnnnnnnnnnnnnnnnnnnnnnnnnnnnnnnnnnnnnnnnnnnnnnnnnnnnnnnnnnnnnnnnnnnnnnnnnnnnnnnnnnnnnnnnnnnnnnnnnnnnnnnnnnnnnnnnnnnnnnnnnnnnnnnnnnnnnnnnnnnnnnnnnnnnnnnnnnnnnnnnnnnnnnnnnnnnnnnnnnnnnnnnnnnnnnnnnnnnnnnnnnnnnnnnnnnnnnnnnnnnnnnnnnnnnnnnnnnnnnnnnnnnnnnnnnnnnnnnnnnnnnnnnnnnnnnnnnnnnnnnnnnnnnnnnnnnnnnnnnnnnnnnnnnnnnnnnnnnnnnnnnnnnnnnnnnnnnnnnnnnnnnnnnnnnnnnnnnnnnnnnnnnnnnnnnnnnnnnnnnnnnnnnnnnnnnnnnnnnnnnnnnnnnnnnnnnnnnnnnnnnnnnnnnnnnnnnnnnnnnnnnnnnnnnnnnnnnnnnnnnnnnnnnnnnnnnnnnnnnnnnnnnnnnnnnnnnnnnnnnnnnnnnnnnnnnnnnnnnnnnnnnnnnnnnnnnnnnnnnnnnnnnnnnnnnnnnnnnnnnnnnnnnnnnnnnnnnnnnnnnnnnnnnnnnnnnnnnnnnnnnnnnnnnnnnnnnnnnnnnnnnnnnnnnnnnnnnnnnnnnnnnnnnnnnnnnnnnnnnnnnnnnnnnnnnnnnnnnnnnnnnnnnnnnnnnnnnnnnnnnnnnnnnnnnnnnnnnnnnnnnnnnnnnnnnnnnnnnnnnnnnnnnnnnnnnnnnnnnnnnnnnnnnnnnnnnnnnnnnnnnnnnnnnnnnnnnnnnnnnnnnnnnnnnnnnnnnnnnnnnnnnnnnnnnnnnnnnnnnnnnnnnnnnnnnnnnnnnnnnnnnnnnnnnnnnnnnnnnnnnnnnnnnnnnnnnnnnnnnnnnnnnnnnnnnnnnnnnnnnnnnnnnnnnnnnnnnnnnnnnnnnnnnnnnnnnnnnnnnnnnnnnnnnnnnnnnnnnnnnnnnnnnnnnnnnnnnnnnnnnnnnnnnnnnnnnnnnnnnnnnnnnnnnnnnnnnnnnnnnnnnnnnnnnnnnnnnnnnnnnnnnnnnnnnnnnnnnnnnnnnnnnnnnnnnnnnnnnnnnnnnnnnnnnnnnnnnnnnnnnnnnnnnnnnnnnnnnnnnnnnnnnnnnnnnnnnnnnnnnnnnnnnnnnnnnnnnnnnnnnnnnnnnnnnnnnnnnnnnnnnnnnnnnnnnnnnnnnnnnnnnnnnnnnnnnnnnnnnnnnnnnnnnnnnnnnnnnnnnnnnnnnnnnnnnnnnnnnnnnnnnnnnnnnnnnnnnnnnnnnnnnnnnnnnnnnnnnnnnnnnnnnnnnnnnnnnnnnnnnnnnnnnnnnnnnnnnnnnnnnnnnnnnnnnnnnnnnnnnnnnnnnnnnnnnnnnnnnnnnnnnnnnnnnnnnnnnnnnnnnnnnnnnnnnnnnnnnnnnnnnnnnnnnnnnnnnnnnnnnnnnnnnnnnnnnnnnnnnnnnnnnnnnnnnnnnnnnnnnnnnnnnnnnnnnnnnnnnnnnnnnnnnnnnnnnnnnnnnnnnnnnnnnnnnnnnnnnnnnnnnnnnnnnnnnnnnnnnnnnnnnnnnnnnnnnnnnnnnnnnnnnnnnnnnnnnnnnnnnnnnnnnnnnnnnnnnnnnnnnnnnnnnnnnnnnnnnnnnnnnnnnnnnnnnnnnnnnnnnnnnnnnnnnnnnnnnnnnnnnnnnnnnnnnnnnnnnnnnnnnnnnnnnnnnnnnnnnnnnnnnnnnnnnnnnnnnnnnnnnnnnnnnnnnnnnnnnnnnnnnnnnnnnnnnnnnnnnnnnnnnnnnnnnnnnnnnnnnnnnnnnnnnnnnnnnnnnnnnnnnnnnnnnnnnnnnnnnnnnnnnnnnnnnnnnnnnnnnnnnnnnnnnnnnnnnnnnnnnnnnnnnnnnnnnnnnnnnnnnnnnnnnnnnnnnnnnnnnnnnnnnnnnnnnnnnnnnnnnnnnnnnnnnnnnnnnnnnnnnnnnnnnnnnnnnnnnnnnnnnnnnnnnnnnnnnnnnnnnnnnnnnnnnnnnnnnnnnnnnnnnnnnnnnnnnnnnnnnnnnnnnnnnnnnnnnnnnnnnnnnnnnnnnnnnnnnnnnnnnnnnnnnnnnnnnnnnnnnnnnnnnnnnnnnnnnnnnnnnnnnnnnnnnnnnnnnnnnnnnnnnnnnnnnnnnnnnnnnnnnnnnnnnnnnnnnnnnnnnnnnnnnnnnnnnnnnnnnnnnnnnnnnnnnnnnnnnnnnnnnnnnnnnnnnnnnnnnnnnnnnnnnnnnnnnnnnnnnnnnnnnnnnnnnnnnnnnnnnnnnnnnnnnnnnnnnnnnnnnnnnnnnnnnnnnnnnnnnnnnnnnnnnnnnnnnnnnnnnnnnnnnnnnnnnnnnnnnnnnnnnnnnnnnnnnnnnnnnnnnnnnnnnnnnnnnnnnnnnnnnnnnnnnnnnnnnnnnnnnnnnnnnnnnnnnnnnnnnnnnnnnnnnnnnnnnnnnnnnnnnnnnnnnnnnnnnnnnnnnnnnnnnnnnnnnnnnnnnnnnnnnnnnnnnnnnnnnnnnnnnnnnnnnnnnnnnnnnnnnnnnnnnnnnnnnnnnnnnnnnnnnnnnnnnnnnnnnnnnnnnnnnnnnnnnnnnnnnnnnnnnnnnnnnnnnnnnnnnnnnnnnnnnnnnnnnnnnnnnnnnnnnnnnnnnnnnnnnnnnnnnnnnnnnnnnnnnnnnnnnnnnnnnnnnnnnnnnnnnnnnnnnnnnnnnnnnnnnnnnnnnnnnnnnnnnnnnnnnnnnnnnnnnnnnnnnnnnnnnnnnnnnnnnnnnnnnnnnnnnnnnnnnnnnnnnnnnnnnnnnnnnnnnnnnnnnnnnnnnnnnnnnnnnnnnnnnnnnnnnnnnnnnnnnnnnnnnnnnnnnnnnnnnnnnnnnnnnnnnnnnnnnnnnnnnnnnnnnnnnnnnnnnnnnnnnnnnnnnnnnnnnnnnnnnnnnnnnnnnnnnnnnnnnnnnnnnnnnnnnnnnnnnnnnnnnnnnnnnnnnnnnnnnnnnnnnnnnnnnnnnnnnnnnnnnnnnnnnnnnnnnnnnnnnnnnnnnnnnnnnnnnnnnnnnnnnnnnnnnnnnnnnnnnnnnnnnnnnnnnnnnnnnnnnnnnnnnnnnnnnnnnnnnnnnnnnnnnnnnnnnnnnnnnnnnnnnnnnnnnnnnnnnnnnnnnnnnnnnnnnnnnnnnnnnnnnnnnnnnnnnnnnnnnnnnnnnnnnnnnnnnnnnnnnnnnnnnnnnnnnnnnnnnnnnnnnnnnnnnnnnnnnnnnnnnnnnnnnnnnnnnnnnnnnnnnnnnnnnnnnnnnnnnnnnnnnnnnnnnnnnnnnnnnnnnnnnnnnnnnnnnnnnnnnnnnnnnnnnnnnnnnnnnnnnnnnnnnnnnnnnnnnnnnnnnnnnnnnnnnnnnnnnnnnnnnnnnnnnnnnnnnnnnnnnnnnnnnnnnnnnnnnnnnnnnnnnnnnnnnnnnnnnnnnnnnnnnnnnnnnnnnnnnnnnnnnnnnnnnnnnnnnnnnnnnnnnnnnnnnnnnnnnnnnnnnnnnnnnnnnnnnnnnnnnnnnnnnnnnnnnnnnnnnnnnnnnnnnnnnnnnnnnnnnnnnnnnnnnnnnnnnnnnnnnnnnnnnnnnnnnnnnnnnnnnnnnnnnnnnnnnnnnnnnnnnnnnnnnnnnnnnnnnnnnnnnnnnnnnnnnnnnnnnnnnnnnnnnnnnnnnnnnnnnnnnnnnnnnnnnnnnnnnnnnnnnnnnnnnnnnnnnnnnnnnnnnnnnnnnnnnnnnnnnnnnnnnnnnnnnnnnnnnnnnnnnnnnnnnnnnnnnnnnnnnnnnnnnnnnnnnnnnnnnnnnnnnnnnnnnnnnnnnnnnnnnnnnnnnnnnnnnnnnnnnnnnnnnnnnnnnnnnnnnnnnnnnnnnnnnnnnnnnnnnnnnnnnnnnnnnnnnnnnnnnnnnnnnnnnnnnnnnnnnnnnnnnnnnnnnnnnnnnnnnnnnnnnnnnnnnnnnnnnnnnnnnnnnnnnnnnnnnnnnnnnnnnnnnnnnnnnnnnnnnnnnnnnnnnnnnnnnnnnnnnnnnnnnnnnnnnnnnnnnnnnnnnnnnnnnnnnnnnnnnnnnnnnnnnnnnnnnnnnnnnnnnnnnnnnnnnnnnnnnnnnnnnnnnnnnnnnnnnnnnnnnnnnnnnnnnnnnnnnnnnnnnnnnnnnnnnnnnnnnnnnnnnnnnnnnnnnnnnnnnnnnnnnnnnnnnnnnnnnnnnnnnnnnnnnnnnnnnnnnnnnnnnnnnnnnnnnnnnnnnnnnnnnnnnnnnnnnnnnnnnnnnnnnnnnnnnnnnnnnnnnnnnnnnnnnnnnnnnnnnnnnnnnnnnnnnnnnnnnnnnnnnnnnnnnnnnnnnnnnnnnnnnnnnnnnnnnnnnnnnnnnnnnnnnnnnnnnnnnnnnnnnnnnnnnnnnnnnnnnnnnnnnnnnnnnnnnnnnnnnnnnnnnnnnnnnnnnnnnnnnnnnnnnnnnnnnnnnnnnnnnnnnnnnnnnnnnnnnnnnnnnnnnnnnnnnnnnnnnnnnnnnnnnnnnnnnnnnnnnnnnnnnnnnnnnnnnnnnnnnnnnnnnnnnnnnnnnnnnnnnnnnnnnnnnnnnnnnnnnnnnnnnnnnnnnnnnnnnnnnnnnnnnnnnnnnnnnnnnnnnnnnnnnnnnnnnnnnnnnnnnnnnnnnnnnnnnnnnnnnnnnnnnnnnnnnnnnnnnnnnnnnnnnnnnnnnnnnnnnnnnnnnnnnnnnnnnnnnnnnnnnnnnnnnnnnnnnnnnnnnnnnnnnnnnnnnnnnnnnnnnnnnnnnnnnnnnnnnnnnnnnnnnnnnnnnnnnnnnnnnnnnnnnnnnnnnnnnnnnnnnnnnnnnnnnnnnnnnnnnnnnnnnnnnnnnnnnnnnnnnnnnnnnnnnnnnnnnnnnnnnnnnnnnnnnnnnnnnnnnnnnnnnnnnnnnnnnnnnnnnnnnnnnnnnnnnnnnnnnnnnnnnnnnnnnnnnnnnnnnnnnnnnnnnnnnnnnnnnnnnnnnnnnnnnnnnnnnnnnnnnnnnnnnnnnnnnnnnnnnnnnnnnnnnnnnnnnnnnnnnnnnnnnnnnnnnnnnnnnnnnnnnnnnnnnnnnnnnnnnnnnnnnnnnnnnnnnnnnnnnnnnnnnnnnnnnnnnnnnnnnnnnnnnnnnnnnnnnnnnnnnnnnnnnnnnnnnnnnnnnnnnnnnnnnnnnnnnnnnnnnnnnnnnnnnnnnnnnnnnnnnnnnnnnnnnnnnnnnnnnnnnnnnnnnnnnnnnnnnnnnnnnnnnnnnnnnnnnnnnnnnnnnnnnnnnnnnnnnnnnnnnnnnnnnnnnnnnnnnnnnnnnnnnnnnnnnnnnnnnnnnnnnnnnnnnnnnnnnnnnnnnnnnnnnnnnnnnnnnnnnnnnnnnnnnnnnnnnnnnnnnnnnnnnnnnnnnnnnnnnnnnnnnnnnnnnnnnnnnnnnnnnnnnnnnnnnnnnnnnnnnnnnnnnnnnnnnnnnnnnnnnnnnnnnnnnnnnnnnnnnnnnnnnnnnnnnnnnnnnnnnnnnnnnnnnnnnnnnnnnnnnnnnnnnnnnnnnnnnnnnnnnnnnnnnnnnnnnnnnnnnnnnnnnnnnnnnnnnnnnnnnnnnnnnnnnnnnnnnnnnnnnnnnnnnnnnnnnnnnnnnnnnnnnnnnnnnnnnnnnnnnnnnnnnnnnnnnnnnnnnnnnnnnnnnnnnnnnnnnnnnnnnnnnnnnnnnnnnnnnnnnnnnnnnnnnnnnnnnnnnnnnnnnnnnnnnnnnnnnnnnnnnnnnnnnnnnnnnnnnnnnnnnnnnnnnnnnnnnnnnnnnnnnnnnnnnnnnnnnnnnnnnnnnnnnnnnnnnnnnnnnnnnnnnnnnnnnnnnnnnnnnnnnnnnnnnnnnnnnnnnnnnnnnnnnnnnnnnnnnnnnnnnnnnnnnnnnnnnnnnnnnnnnnnnnnnnnnnnnnnnnnnnnnnnnnnnnnnnnnnnnnnnnnnnnnnnnnnnnnnnnnnnnnnnnnnnnnnnnnnnnnnnnnnnnnnnnnnnnnnnnnnnnnnnnnnnnnnnnnnnnnnnnnnnnnnnnnnnnnnnnnnnnnnnnnnnnnnnnnnnnnnnnnnnnnnnnnnnnnnnnnnnnnnnnnnnnnnnnnnnnnnnnnnnnnnnnnnnnnnnnnnnnnnnnnnnnnnnnnnnnnnnnnnnnnnnnnnnnnnnnnnnnnnnnnnnnnnnnnnnnnnnnnnnnnnnnnnnnnnnnnnnnnnnnnnnnnnnnnnnnnnnnnnnnnnnnnnnnnnnnnnnnnnnnnnnnnnnnnnnnnnnnnnnnnnnnnnnnnnnnnnnnnnnnnnnnnnnnnnnnnnnnnnnnnnnnnnnnnnnnnnnnnnnnnnnnnnnnnnnnnnnnnnnnnnnnnnnnnnnnnnnnnnnnnnnnnnnnnnnnnnnnnnnnnnnnnnnnnnnnnnnnnnnnnnnnnnnnnnnnnnnnnnnnnnnnnnnnnnnnnnnnnnnnnnnnnnnnnnnnnnnnnnnnnnnnnnnnnnnnnnnnnnnnnnnnnnnnnnnnnnnnnnnnnnnnnnnnnnnnnnnnnnnnnnnnnnnnnnnnnnnnnnnnnnnnnnnnnnnnnnnnnnnnnnnnnnnnnnnnnnnnnnnnnnnnnnnnnnnnnnnnnnnnnnnnnnnnnnnnnnnnnnnnnnnnnnnnnnnnnnnnnnnnnnnnnnnnnnnnnnnnnnnnnnnnnnnnnnnnnnnnnnnnnnnnnnnnnnnnnnnnnnnnnnnnnnnnnnnnnnnnnnnnnnnnnnnnnnnnnnnnnnnnnnnnnnnnnnnnnnnnnnnnnnnnnnnnnnnnnnnnnnnnnnnnnnnnnnnnnnnnnnnnnnnnnnnnnnnnnnnnnnnnnnnnnnnnnnnnnnnnnnnnnnnnnnnnnnnnnnnnnnnnnnnnnnnnnnnnnnnnnnnnnnnnnnnnnnnnnnnnnnnnnnnnnnnnnnnnnnnnnnnnnnnnnnnnnnnnnnnnnnnnnnnnnnnnnnnnnnnnnnnnnnnnnnnnnnnnnnnnnnnnnnnnnnnnnnnnnnnnnnnnnnnnnnnnnnnnnnnnnnnnnnnnnnnnnnnnnnnnnnnnnnnnnnnnnnnnnnnnnnnnnnnnnnnnnnnnnnnnnnnnnnnnnnnnnnnnnnnnnnnnnnnnnnnnnnnnnnnnnnnnnnnnnnnnnnnnnnnnnnnnnnnnnnnnnnnnnnnnnnnnnnnnnnnnnnnnnnnnnnnnnnnnnnnnnnnnnnnnnnnnnnnnnnnnnnnnnnnnnnnnnnnnnnnnnnnnnnnnnnnnnnnnnnnnnnnnnnnnnnnnnnnnnnnnnnnnnnnnnnnnnnnnnnnnnnnnnnnnnnnnnnnnnnnnnnnnnnnnnnnnnnnnnnnnnnnnnnnnnnnnnnnnnnnnnnnnnnnnnnnnnnnnnnnnnnnnnnnnnnnnnnnnnnnnnnnnnnnnnnnnnnnnnnnnnnnnnnnnnnnnnnnnnnnnnnnnnnnnnnnnnnnnnnnnnnnnnnnnnnnnnnnnnnnnnnnnnnnnnnnnnnnnnnnnnnnnnnnnnnnnnnnnnnnnnnnnnnnnnnnnnnnnnnnnnnnnnnnnnnnnnnnnnnnnnnnnnnnnnnnnnnnnnnnnnnnnnnnnnnnnnnnnnnnnnnnnnnnnnnnnnnnnnnnnnnnnnnnnnnnnnnnnnnnnnnnnnnnnnnnnnnnnnnnnnnnnnnnnnnnnnnnnnnnnnnnnnnnnnnnnnnnnnnnnnnnnnnnnnnnnnnnnnnnnnnnnnnnnnnnnnnnnnnnnnnnnnnnnnnnnnnnnnnnnnnnnnnnnnnnnnnnnnnnnnnnnnnnnnnnnnnnnnnnnnnnnnnnnnnnnnnnnnnnnnnnnnnnnnnnnnnnnnnnnnnnnnnnnnnnnnnnnnnnnnnnnnnnnnnnnnnnnnnnnnnnnnnnnnnnnnnnnnnnnnnnnnnnnnnnnnnnnnnnnnnnnnnnnnnnnnnnnnnnnnnnnnnnnnnnnnnnnnnnnnnnnnnnnnnnnnnnnnnnnnnnnnnnnnnnnnnnnnnnnnnnnnnnnnnnnnnnnnnnnnnnnnnnnnnnnnnnnnnnnnnnnnnnnnnnnnnnnnnnnnnnnnnnnnnnnnnnnnnnnnnnnnnnnnnnnnnnnnnnnnnnnnnnnnnnnnnnnnnnnnnnnnnnnnnnnnnnnnnnnnnnnnnnnnnnnnnnnnnnnnnnnnnnnnnnnnnnnnnnnnnnnnnnnnnnnnnnnnnnnnnnnnnnnnnnnnnnnnnnnnnnnnnnnnnnnnnnnnnnnnnnnnnnnnnnnnnnnnnnnnnnnnnnnnnnnnnnnnnnnnnnnnnnnnnnnnnnnnnnnnnnnnnnnnnnnnnnnnnnnnnnnnnnnnnnnnnnnnnnnnnnnnnnnnnnnnnnnnnnnnnnnnnnnnnnnnnnnnnnnnnnnnnnnnnnnnnnnnnnnnnnnnnnnnnnnnnnnnnnnnnnnnnnnnnnnnnnnnnnnnnnnnnnnnnnnnnnnnnnnnnnnnnnnnnnnnnnnnnnnnnnnnnnnnnnnnnnnnnnnnnnnnnnnnnnnnnnnnnnnnnnnnnnnnnnnnnnnnnnnnnnnnnnnnnnnnnnnnnnnnnnnnnnnnnnnnnnnnnnnnnnnnnnnnnnnnnnnnnnnnnnnnnnnnnnnnnnnnnnnnnnnnnnnnnnnnnnnnnnnnnnnnnnnnnnnnnnnnnnnnnnnnnnnnnnnnnnnnnnnnnnnnnnnnnnnnnnnnnnnnnnnnnnnnnnnnnnnnnnnnnnnnnnnnnnnnnnnnnnnnnnnnnnnnnnnnnnnnnnnnnnnnnnnnnnnnnnnnnnnnnnnnnnnnnnnnnnnnnnnnnnnnnnnnnnnnnnnnnnnnnnnnnnnnnnnnnnnnnnnnnnnnnnnnnnnnnnnnnnnnnnnnnnnnnnnnnnnnnnnnnnnnnnnnnnnnnnnnnnnnnnnnnnnnnnnnnnnnnnnnnnnnnnnnnnnnnnnnnnnnnnnnnnnnnnnnnnnnnnnnnnnnnnnnnnnnnnnnnnnnnnnnnnnnnnnnnnnnnnnnnnnnnnnnnnnnnnnnnnnnnnnnnnnnnnnnnnnnnnnnnnnnnnnnnnnnnnnnnnnnnnnnnnnnnnnnnnnnnnnnnnnnnnnnnnnnnnnnnnnnnnnnnnnnnnnnnnnnnnnnnnnnnnnnnnnnnnnnnnnnnnnnnnnnnnnnnnnnnnnnnnnnnnnnnnnnnnnnnnnnnnnnnnnnnnnnnnnnnnnnnnnnnnnnnnnnnnnnnnnnnnnnnnnnnnnnnnnnnnnnnnnnnnnnnnnnnnnnnnnnnnnnnnnnnnnnnnnnnnnnnnnnnnnnnnnnnnnnnnnnnnnnnnnnnnnnnnnnnnnnnnnnnnnnnnnnnnnnnnnnnnnnnnnnnnnnnnnnnnnnnnnnnnnnnnnnnnnnnnnnnnnnnnnnnnnnnnnnnnnnnnnnnnnnnnnnnnnnnnnnnnnnnnnnnnnnnnnnnnnnnnnnnnnnnnnnnnnnnnnnnnnnnnnnnnnnnnnnnnnnnnnnnnnnnnnnnnnnnnnnnnnnnnnnnnnnnnnnnnnnnnnnnnnnnnnnnnnnnnnnnnnnnnnnnnnnnnnnnnnnnnnnnnnnnnnnnnnnnnnnnnnnnnnnnnnnnnnnnnnnnnnnnnnnnnnnnnnnnnnnnnnnnnnnnnnnnnnnnnnnnnnnnnnnnnnnnnnnnnnnnnnnnnnnnnnnnnnnnnnnnnnnnnnnnnnnnnnnnnnnnnnnnnnnnnnnnnnnnnnnnnnnnnnnnnnnnnnnnnnnnnnnnnnnnnnnnnnnnnnnnnnnnnnnnnnnnnnnnnnnnnnnnnnnnnnnnnnnnnnnnnnnnnnnnnnnnnnnnnnnnnnnnnnnnnnnnnnnnnnnnnnnnnnnnnnnnnnnnnnnnnnnnnnnnnnnnnnnnnnnnnnnnnnnnnnnnnnnnnnnnnnnnnnnnnnnnnnnnnnnnnnnnnnnnnnnnnnnnnnnnnnnnnnnnnnnnnnnnnnnnnnnnnnnnnnnnnnnnnnnnnnnnnnnnnnnnnnnnnnnnnnnnnnnnnnnnnnnnnnnnnnnnnnnnnnnnnnnnnnnnnnnnnnnnnnnnnnnnnnnnnnnnnnnnnnnnnnnnnnnnnnnnnnnnnnnnnnnnnnnnnnnnnnnnnnnnnnnnnnnnnnnnnnnnnnnnnnnnnnnnnnnnnnnnnnnnnnnnnnnnnnnnnnnnnnnnnnnnnnnnnnnnnnnnnnnnnnnnnnnnnnnnnnnnnnnnnnnnnnnnnnnnnnnnnnnnnnnnnnnnnnnnnnnnnnnnnnnnnnnnnnnnnnnnnnnnnnnnnnnnnnnnnnnnnnnnnnnnnnnnnnnnnnnnnnnnnnnnnnnnnnnnnnnnnnnnnnnnnnnnnnnnnnnnnnnnnnnnnnnnnnnnnnnnnnnnnnnnnnnnnnnnnnnnnnnnnnnnnnnnnnnnnnnnnnnnnnnnnnnnnnnnnnnnnnnnnnnnnnnnnnnnnnnnnnnnnnnnnnnnnnnnnnnnnnnnnnnnnnnnnnnnnnnnnnnnnnnnnnnnnnnnnnnnnnnnnnnnnnnnnnnnnnnnnnnnnnnnnnnnnnnnnnnnnnnnnnnnnnnnnnnnnnnnnnnnnnnnnnnnnnnnnnnnnnnnnnnnnnnnnnnnnnnnnnnnnnnnnnnnnnnnnnnnnnnnnnnnnnnnnnnnnnnnnnnnnnnnnnnnnnnnnnnnnnnnnnnnnnnnnnnnnnnnnnnnnnnnnnnnnnnnnnnnnnnnnnnnnnnnnnnnnnnnnnnnnnnnnnnnnnnnnnnnnnnnnnnnnnnnnnnnnnnnnnnnnnnnnnnnnnnnnnnnnnnnnnnnnnnnnnnnnnnnnnnnnnnnnnnnnnnnnnnnnnnnnnnnnnnnnnnnnnnnnnnnnnnnnnnnnnnnnnnnnnnnnnnnnnnnnnnnnnnnnnnnnnnnnnnnnnnnnnnnnnnnnnnnnnnnnnnnnnnnnnnnnnnnnnnnnnnnnnnnnnnnnnnnnnnnnnnnnnnnnnnnnnnnnnnnnnnnnnnnnnnnnnnnnnnnnnnnnnnnnnnnnnnnnnnnnnnnnnnnnnnnnnnnnnnnnnnnnnnnnnnnnnnnnnnnnnnnnnnnnnnnnnnnnnnnnnnnnnnnnnnnnnnnnnnnnnnnnnnnnnnnnnnnnnnnnnnnnnnnnnnnnnnnnnnnnnnnnnnnnnnnnnnnnnnnnnnnnnnnnnnnnnnnnnnnnnnnnnnnnnnnnnnnnnnnnnnnnnnnnnnnnnnnnnnnnnnnnnnnnnnnnnnnnnnnnnnnnnnnnnnnnnnnnnnnnnnnnnnnnnnnnnnnnnnnnnnnnnnnnnnnnnnnnnnnnnnnnnnnnnnnnnnnnnnnnnnnnnnnnnnnnnnnnnnnnnnnnnnnnnnnnnnnnnnnnnnnnnnnnnnnnnnnnnnnnnnnnnnnnnnnnnnnnnnnnnnnnnnnnnnnnnnnnnnnnnnnnnnnnnnnnnnnnnnnnnnnnnnnnnnnnnnnnnnnnnnnnnnnnnnnnnnnnnnnnnnnnnnnnnnnnnnnnnnnnnnnnnnnnnnnnnnnnnnnnnnnnnnnnnnnnnnnnnnnnnnnnnnnnnnnnnnnnnnnnnnnnnnnnnnnnnnnnnnnnnnnnnnnnnnnnnnnnnnnnnnnnnnnnnnnnnnnnnnnnnnnnnnnnnnnnnnnnnnnnnnnnnnnnnnnnnnnnnnnnnnnnnnnnnnnnnnnnnnnnnnnnnnnnnnnnnnnnnnnnnnnnnnnnnnnnnnnnnnnnnnnnnnnnnnnnnnnnnnnnnnnnnnnnnnnnnnnnnnnnnnnnnnnnnnnnnnnnnnnnnnnnnnnnnnnnnnnnnnnnnnnnnnnnnnnnnnnnnnnnnnnnnnnnnnnnnnnnnnnnnnnnnnnnnnnnnnnnnnnnnnnnnnnnnnnnnnnnnnnnnnnnnnnnnnnnnnnnnnnnnnnnnnnnnnnnnnnnnnnnnnnnnnnnnnnnnnnnnnnnnnnnnnnnnnnnnnnnnnnnnnnnnnnnnnnnnnnnnnnnnnnnnnnnnnnnnnnnnnnnnnnnnnnnnnnnnnnnnnnnnnnnnnnnnnnnnnnnnnnnnnnnnnnnnnnnnnnnnnnnnnnnnnnnnnnnnnnnnnnnnnnnnnnnnnnnnnnnnnnnnnnnnnnnnnnnnnnnnnnnnnnnnnnnnnnnnnnnnnnnnnnnnnnnnnnnnnnnnnnnnnnnnnnnnnnnnnnnnnnnnnnnnnnnnnnnnnnnnnnnnnnnnnnnnnnnnnnnnnnnnnnnnnnnnnnnnnnnnnnnnnnnnnnnnnnnnnnnnnnnnnnnnnnnnnnnnnnnnnnnnnnnnnnnnnnnnnnnnnnnnnnnnnnnnnnnnnnnnnnnnnnnnnnnnnnnnnnnnnnnnnnnnnnnnnnnnnnnnnnnnnnnnnnnnnnnnnnnnnnnnnnnnnnnnnnnnnnnnnnnnnnnnnnnnnnnnnnnnnnnnnnnnnnnnnnnnnnnnnnnnnnnnnnnnnnnnnnnnnnnnnnnnnnnnnnnnnnnnnnnnnnnnnnnnnnnnnnnnnnnnnnnnnnnnnnnnnnnnnnnnnnnnnnnnnnnnnnnnnnnnnnnnnnnnnnnnnnnnnnnnnnnnnnnnnnnnnnnnnnnnnnnnnnnnnnnnnnnnnnnnnnnnnnnnnnnnnnnnnnnnnnnnnnnnnnnnnnnnnnnnnnnnnnnnnnnnnnnnnnnnnnnnnnnnnnnnnnnnnnnnnnnnnnnnnnnnnnnnnnnnnnnnnnnnnnnnnnnnnnnnnnnnnnnnnnnnnnnnnnnnnnnnnnnnnnnnnnnnnnnnnnnnnnnnnnnnnnnnnnnnnnnnnnnnnnnnnnnnnnnnnnnnnnnnnnnnnnnnnnnnnnnnnnnnnnnnnnnnnnnnnnnnnnnnnnnnnnnnnnnnnnnnnnnnnnnnnnnnnnnnnnnnnnnnnnnnnnnnnnnnnnnnnnnnnnnnnnnnnnnnnnnnnnnnnnnnnnnnnnnnnnnnnnnnnnnnnnnnnnnnnnnnnnnnnnnnnnnnnnnnnnnnnnnnnnnnnnnnnnnnnnnnnnnnnnnnnnnnnnnnnnnnnnnnnnnnnnnnnnnnnnnnnnnnnnnnnnnnnnnnnnnnnnnnnnnnnnnnnnnnnnnnnnnnnnnnnnnnnnnnnnnnnnnnnnnnnnnnnnnnnnnnnnnnnnnnnnnnnnnnnnnnnnnnnnnnnnnnnnnnnnnnnnnnnnnnnnnnnnnnnnnnnnnnnnnnnnnnnnnnnnnnnnnnnnnnnnnnnnnnnnnnnnnnnnnnnnnnnnnnnnnnnnnnnnnnnnnnnnnnnnnnnnnnnnnnnnnnnnnnnnnnnnnnnnnnnnnnnnnnnnnnnnnnnnnnnnnnnnnnnnnnnnnnnnnnnnnnnnnnnnnnnnnnnnnnnnnnnnnnnnnnnnnnnnnnnnnnnnnnnnnnnnnnnnnnnnnnnnnnnnnnnnnnnnnnnnnnnnnnnnnnnnnnnnnnnnnnnnnnnnnnnnnnnnnnnnnnnnnnnnnnnnnnnnnnnnnnnnnnnnnnnnnnnnnnnnnnnnnnnnnnnnnnnnnnnnnnnnnnnnnnnnnnnnnnnnnnnnnnnnnnnnnnnnnnnnnnnnnnnnnnnnnnnnnnnnnnnnnnnnnnnnnnnnnnnnnnnnnnnnnnnnnnnnnnnnnnnnnnnnnnnnnnnnnnnnnnnnnnnnnnnnnnnnnnnnnnnnnnnnnnnnnnnnnnnnnnnnnnnnnnnnnnnnnnnnnnnnnnnnnnnnnnnnnnnnnnnnnnnnnnnnnnnnnnnnnnnnnnnnnnnnnnnnnnnnnnnnnnnnnnnnnnnnnnnnnnnnnnnnnnnnnnnnnnnnnnnnnnnnnnnnnnnnnnnnnnnnnnnnnnnnnnnnnnnnnnnnnnnnnnnnnnnnnnnnnnnnnnnnnnnnnnnnnnnnnnnnnnnnnnnnnnnnnnnnnnnnnnnnnnnnnnnnnnnnnnnnnnnnnnnnnnnnnnnnnnnnnnnnnnnnnnnnnnnnnnnnnnnnnnnnnnnnnnnnnnnnnnnnnnnnnnnnnnnnnnnnnnnnnnnnnnnnnnnnnnnnnnnnnnnnnnnnnnnnnnnnnnnnnnnnnnnnnnnnnnnnnnnnnnnnnnnnnnnnnnnnnnnnnnnnnnnnnnnnnnnnnnnnnnnnnnnnnnnnnnnnnnnnnnnnnnnnnnnnnnnnnnnnnnnnnnnnnnnnnnnnnnnnnnnnnnnnnnnnnnnnnnnnnnnnnnnnnnnnnnnnnnnnnnnnnnnnnnnnnnnnnnnnnnnnnnnnnnnnnnnnnnnnnnnnnnnnnnnnnnnnnnnnnnnnnnnnnnnnnnnnnnnnnnnnnnnnnnnnnnnnnnnnnnnnnnnnnnnnnnnnnnnnnnnnnnnnnnnnnnnnnnnnnnnnnnnnnnnnnnnnnnnnnnnnnnnnnnnnnnnnnnnnnnnnnnnnnnnnnnnnnnnnnnnnnnnnnnnnnnnnnnnnnnnnnnnnnnnnnnnnnnnnnnnnnnnnnnnnnnnnnnnnnnnnnnnnnnnnnnnnnnnnnnnnnnnnnnnnnnnnnnnnnnnnnnnnnnnnnnnnnnnnnnnnnnnnnnnnnnnnnnnnnnnnnnnnnnnnnnnnnnnnnnnnnnnnnnnnnnnnnnnnnnnnnnnnnnnnnnnnnnnnnnnnnnnnnnnnnnnnnnnnnnnnnnnnnnnnnnnnnnnnnnnnnnnnnnnnnnnnnnnnnnnnnnnnnnnnnnnnnnnnnnnnnnnnnnnnnnnnnnnnnnnnnnnnnnnnnnnnnnnnnnnnnnnnnnnnnnnnnnnnnnnnnnnnnnnnnnnnnnnnnnnnnnnnnnnnnnnnnnnnnnnnnnnnnnnnnnnnnnnnnnnnnnnnnnnnnnnnnnnnnnnnnnnnnnnnnnnnnnnnnnnnnnnnnnnnnnnnnnnnnnnnnnnnnnnnnnnnnnnnnnnnnnnnnnnnnnnnnnnnnnnnnnnnnnnnnnnnnnnnnnnnnnnnnnnnnnnnnnnnnnnnnnnnnnnnnnnnnnnnnnnnnnnnnnnnnnnnnnnnnnnnnnnnnnnnnnnnnnnnnnnnnnnnnnnnnnnnnnnnnnnnnnnnnnnnnnnnnnnnnnnnnnnnnnnnnnnnnnnnnnnnnnnnnnnnnnnnnnnnnnnnnnnnnnnnnnnnnnnnnnnnnnnnnnnnnnnnnnnnnnnnnnnnnnnnnnnnnnnnnnnnnnnnnnnnnnnnnnnnnnnnnnnnnnnnnnnnnnnnnnnnnnnnnnnnnnnnnnnnnnnnnnnnnnnnnnnnnnnnnnnnnnnnnnnnnnnnnnnnnnnnnnnnnnnnnnnnnnnnnnnnnnnnnnnnnnnnnnnnnnnnnnnnnnnnnnnnnnnnnnnnnnnnnnnnnnnnnnnnnnnnnnnnnnnnnnnnnnnnnnnnnnnnnnnnnnnnnnnnnnnnnnnnnnnnnnnnnnnnnnnnnnnnnnnnnnnnnnnnnnnnnnnnnnnnnnnnnnnnnnnnnnnnnnnnnnnnnnnnnnnnnnnnnnnnnnnnnnnnnnnnnnnnnnnnnnnnnnnnnnnnnnnnnnnnnnnnnnnnnnnnnnnnnnnnnnnnnnnnnnnnnnnnnnnnnnnnnnnnnnnnnnnnnnnnnnnnnnnnnnnnnnnnnnnnnnnnnnnnnnnnnnnnnnnnnnnnnnnnnnnnnnnnnnnnnnnnnnnnnnnnnnnnnnnnnnnnnnnnnnnnnnnnnnnnnnnnnnnnnnnnnnnnnnnnnnnnnnnnnnnnnnnnnnnnnnnnnnnnnnnnnnnnnnnnnnnnnnnnnnnnnnnnnnnnnnnnnnnnnnnnnnnnnnnnnnnnnnnnnnnnnnnnnnnnnnnnnnnnnnnnnnnnnnnnnnnnnnnnnnnnnnnnnnnnnnnnnnnnnnnnnnnnnnnnnnnnnnnnnnnnnnnnnnnnnnnnnnnnnnnnnnnnnnnnnnnnnnnnnnnnnnnnnnnnnnnnnnnnnnnnnnnnnnnnnnnnnnnnnnnnnnnnnnnnnnnnnnnnnnnnnnnnnnnnnnnnnnnnnnnnnnnnnnnnnnnnnnnnnnnnnnnnnnnnnnnnnnnnnnnnnnnnnnnnnnnnnnnnnnnnnnnnnnnnnnnnnnnnnnnnnnnnnnnnnnnnnnnnnnnnnnnnnnnnnnnnnnnnnnnnnnnnnnnnnnnnnnnnnnnnnnnnnnnnnnnnnnnnnnnnnnnnnnnnnnnnnnnnnnnnnnnnnnnnnnnnnnnnnnnnnnnnnnnnnnnnnnnnnnnnnnnnnnnnnnnnnnnnnnnnnnnnnnnnnnnnnnnnnnnnnnnnnnnnnnnnnnnnnnnnnnnnnnnnnnnnnnnnnnnnnnnnnnnnnnnnnnnnnnnnnnnnnnnnnnnnnnnnnnnnnnnnnnnnnnnnnnnnnnnnnnnnnnnnnnnnnnnnnnnnnnnnnnnnnnnnnnnnnnnnnnnnnnnnnnnnnnnnnnnnnnnnnnnnnnnnnnnnnnnnnnnnnnnnnnnnnnnnnnnnnnnnnnnnnnnnnnnnnnnnnnnnnnnnnnnnnnnnnnnnnnnnnnnnnnnnnnnnnnnnnnnnnnnnnnnnnnnnnnnnnnnnnnnnnnnnnnnnnnnnnnnnnnnnnnnnnnnnnnnnnnnnnnnnnnnnnnnnnnnnnnnnnnnnnnnnnnnnnnnnnnnnnnnnnnnnnnnnnnnnnnnnnnnnnnnnnnnnnnnnnnnnnnnnnnnnnnnnnnnnnnnnnnnnnnnnnnnnnnnnnnnnnnnnnnnnnnnnnnnnnnnnnnnnnnnnnnnnnnnnnnnnnnnnnnnnnnnnnnnnnnnnnnnnnnnnnnnnnnnnnnnnnnnnnnnnnnnnnnnnnnnnnnnnnnnnnnnnnnnnnnnnnnnnnnnnnnnnnnnnnnnnnnnnnnnnnnnnnnnnnnnnnnnnnnnnnnnnnnnnnnnnnnnnnnnnnnnnnnnnnnnnnnnnnnnnnnnnnnnnnnnnnnnnnnnnnnnnnnnnnnnnnnnnnnnnnnnnnnnnnnnnnnnnnnnnnnnnnnnnnnnnnnnnnnnnnnnnnnnnnnnnnnnnnnnnnnnnnnnnnnnnnnnnnnnnnnnnnnnnnnnnnnnnnnnnnnnnnnnnnnnnnnnnnnnnnnnnnnnnnnnnnnnnnnnnnnnnnnnnnnnnnnnnnnnnnnnnnnnnnnnnnnnnnnnnnnnnnnnnnnnnnnnnnnnnnnnnnnnnnnnnnnnnnnnnnnnnnnnnnnnnnnnnnnnnnnnnnnnnnnnnnnnnnnnnnnnnnnnnnnnnnnnnnnnnnnnnnnnnnnnnnnnnnnnnnnnnnnnnnnnnnnnnnnnnnnnnnnnnnnnnnnnnnnnnnnnnnnnnnnnnnnnnnnnnnnnnnnnnnnnnnnnnnnnnnnnnnnnnnnnnnnnnnnnnnnnnnnnnnnnnnnnnnnnnnnnnnnnnnnnnnnnnnnnnnnnnnnnnnnnnnnnnnnnnnnnnnnnnnnnnnnnnnnnnnnnnnnnnnnnnnnnnnnnnnnnnnnnnnnnnnnnnnnnnnnnnnnnnnnnnnnnnnnnnnnnnnnnnnnnnnnnnnnnnnnnnnnnnnnnnnnnnnnnnnnnnnnnnnnnnnnnnnnnnnnnnnnnnnnnnnnnnnnnnnnnnnnnnnnnnnnnnnnnnnnnnnnnnnnnnnnnnnnnnnnnnnnnnnnnnnnnnnnnnnnnnnnnnnnnnnnnnnnnnnnnnnnnnnnnnnnnnnnnnnnnnnnnnnnnnnnnnnnnnnnnnnnnnnnnnnnnnnnnnnnnnnnnnnnnnnnnnnnnnnnnnnnnnnnnnnnnnnnnnnnnnnnnnnnnnnnnnnnnnnnnnnnnnnnnnnnnnnnnnnnnnnnnnnnnnnnnnnnnnnnnnnnnnnnnnnnnnnnnnnnnnnnnnnnnnnnnnnnnnnnnnnnnnnnnnnnnnnnnnnnnnnnnnnnnnnnnnnnnnnnnnnnnnnnnnnnnnnnnnnnnnnnnnnnnnnnnnnnnnnnnnnnnnnnnnnnnnnnnnnnnnnnnnnnnnnnnnnnnnnnnnnnnnnnnnnnnnnnnnnnnnnnnnnnnnnnnnnnnnnnnnnnnnnnnnnnnnnnnnnnnnnnnnnnnnnnnnnnnnnnnnnnnnnnnnnnnnnnnnnnnnnnnnnnnnnnnnnnnnnnnnnnnnnnnnnnnnnnnnnnnnnnnnnnnnnnnnnnnnnnnnnnnnnnnnnnnnnnnnnnnnnnnnnnnnnnnnnnnnnnnnnnnnnnnnnnnnnnnnnnnnnnnnnnnnnnnnnnnnnnnnnnnnnnnnnnnnnnnnnnnnnnnnnnnnnnnnnnnnnnnnnnnnnnnnnnnnnnnnnnnnnnnnnnnnnnnnnnnnnnnnnnnnnnnnnnnnnnnnnnnnnnnnnnnnnnnnnnnnnnnnnnnnnnnnnnnnnnnnnnnnnnnnnnnnnnnnnnnnnnnnnnnnnnnnnnnnnnnnnnnnnnnnnnnnnnnnnnnnnnnnnnnnnnnnnnnnnnnnnnnnnnnnnnnnnnnnnnnnnnnnnnnnnnnnnnnnnnnnnnnnnnnnnnnnnnnnnnnnnnnnnnnnnnnnnnnnnnnnnnnnnnnnnnnnnnnnnnnnnnnnnnnnnnnnnnnnnnnnnnnnnnnnnnnnnnnnnnnnnnnnnnnnnnnnnnnnnnnnnnnnnnnnnnnnnnnnnnnnnnnnnnnnnnnnnnnnnnnnnnnnnnnnnnnnnnnnnnnnnnnnnnnnnnnnnnnnnnnnnnnnnnnnnnnnnnnnnnnnnnnnnnnnnnnnnnnnnnnnnnnnnnnnnnnnnnnnnnnnnnnnnnnnnnnnnnnnnnnnnnnnnnnnnnnnnnnnnnnnnnnnnnnnnnnnnnnnnnnnnnnnnnnnnnnnnnnnnnnnnnnnnnnnnnnnnnnnnnnnnnnnnnnnnnnnnnnnnnnnnnnnnnnnnnnnnnnnnnnnnnnnnnnnnnnnnnnnnnnnnnnnnnnnnnnnnnnnnnnnnnnnnnnnnnnnnnnnnnnnnnnnnnnnnnnnnnnnnnnnnnnnnnnnnnnnnnnnnnnnnnnnnnnnnnnnnnnnnnnnnnnnnnnnnnnnnnnnnnnnnnnnnnnnnnnnnnnnnnnnnnnnnnnnnnnnnnnnnnnnnnnnnnnnnnnnnnnnnnnnnnnnnnnnnnnnnnnnnnnnnnnnnnnnnnnnnnnnnnnnnnnnnnnnnnnnnnnnnnnnnnnnnnnnnnnnnnnnnnnnnnnnnnnnnnnnnnnnnnnnnnnnnnnnnnnnnnnnnnnnnnnnnnnnnnnnnnnnnnnnnnnnnnnnnnnnnnnnnnnnnnnnnnnnnnnnnnnnnnnnnnnnnnnnnnnnnnnnnnnnnnnnnnnnnnnnnnnnnnnnnnnnnnnnnnnnnnnnnnnnnnnnnnnnnnnnnnnnnnnnnnnnnnnnnnnnnnnnnnnnnnnnnnnnnnnnnnnnnnnnnnnnnnnnnnnnnnnnnnnnnnnnnnnnnnnnnnnnnnnnnnnnnnnnnnnnnnnnnnnnnnnnnnnnnnnnnnnnnnnnnnnnnnnnnnnnnnnnnnnnnnnnnnnnnnnnnnnnnnnnnnnnnnnnnnnnnnnnnnnnnnnnnnnnnnnnnnnnnnnnnnnnnnnnnnnnnnnnnnnnnnnnnnnnnnnnnnnnnnnnnnnnnnnnnnnnnnnnnnnnnnnnnnnnnnnnnnnnnnnnnnnnnnnnnnnnnnnnnnnnnnnnnnnnnnnnnnnnnnnnnnnnnnnnnnnnnnnnnnnnnnnnnnnnnnnnnnnnnnnnnnnnnnnnnnnnnnnnnnnnnnnnnnnnnnnnnnnnnnnnnnnnnnnnnnnnnnnnnnnnnnnnnnnnnnnnnnnnnnnnnnnnnnnnnnnnnnnnnnnnnnnnnnnnnnnnnnnnnnnnnnnnnnnnnnnnnnnnnnnnnnnnnnnnnnnnnnnnnnnnnnnnnnnnnnnnnnnnnnnnnnnnnnnnnnnnnnnnnnnnnnnnnnnnnnnnnnnnnnnnnnnnnnnnnnnnnnnnnnnnnnnnnnnnnnnnnnnnnnnnnnnnnnnnnnnnnnnnnnnnnnnnnnnnnnnnnnnnnnnnnnnnnnnnnnnnnnnnnnnnnnnnnnnnnnnnnnnnnnnnnnnnnnnnnnnnnnnnnnnnnnnnnnnnnnnnnnnnnnnnnnnnnnnnnnnnnnnnnnnnnnnnnnnnnnnnnnnnnnnnnnnnnnnnnnnnnnnnnnnnnnnnnnnnnnnnnnnnnnnnnnnnnnnnnnnnnnnnnnnnnnnnnnnnnnnnnnnnnnnnnnnnnnnnnnnnnnnnnnnnnnnnnnnnnnnnnnnnnnnnnnnnnnnnnnnnnnnnnnnnnnnnnnnnnnnnnnnnnnnnnnnnnnnnnnnnnnnnnnnnnnnnnnnnnnnnnnnnnnnnnnnnnnnnnnnnnnnnnnnnnnnnnnnnnnnnnnnnnnnnnnnnnnnnnnnnnnnnnnnnnnnnnnnnnnnnnnnnnnnnnnnnnnnnnnnnnnnnnnnnnnnnnnnnnnnnnnnnnnnnnnnnnnnnnnnnnnnnnnnnnnnnnnnnnnnnnnnnnnnnnnnnnnnnnnnnnnnnnnnnnnnnnnnnnnnnnnnnnnnnnnnnnnnnnnnnnnnnnnnnnnnnnnnnnnnnnnnnnnnnnnnnnnnnnnnnnnnnnnnnnnnnnnnnnnnnnnnnnnnnnnnnnnnnnnnnnnnnnnnnnnnnnnnnnnnnnnnnnnnnnnnnnnnnnnnnnnnnnnnnnnnnnnnnnnnnnnnnnnnnnnnnnnnnnnnnnnnnnnnnnnnnnnnnnnnnnnnnnnnnnnnnnnnnnnnnnnnnnnnnnnnnnnnnnnnnnnnnnnnnnnnnnnnnnnnnnnnnnnnnnnnnnnnnnnnnnnnnnnnnnnnnnnnnnnnnnnnnnnnnnnnnnnnnnnnnnnnnnnnnnnnnnnnnnnnnnnnnnnnnnnnnnnnnnnnnnnnnnnnnnnnnnnnnnnnnnnnnnnnnnnnnnnnnnnnnnnnnnnnnnnnnnnnnnnnnnnnnnnnnnnnnnnnnnnnnnnnnnnnnnnnnnnnnnnnnnnnnnnnnnnnnnnnnnnnnnnnnnnnnnnnnnnnnnnnnnnnnnnnnnnnnnnnnnnnnnnnnnnnnnnnnnnnnnnnnnnnnnnnnnnnnnnnnnnnnnnnnnnnnnnnnnnnnnnnnnnnnnnnnnnnnnnnnnnnnnnnnnnnnnnnnnnnnnnnnnnnnnnnnnnnnnnnnnnnnnnnnnnnnnnnnnnnnnnnnnnnnnnnnnnnnnnnnnnnnnnnnnnnnnnnnnnnnnnnnnnnnnnnnnnnnnnnnnnnnnnnnnnnnnnnnnnnnnnnnnnnnnnnnnnnnnnnnnnnnnnnnnnnnnnnnnnnnnnnnnnnnnnnnnnnnnnnnnnnnnnnnnnnnnnnnnnnnnnnnnnnnnnnnnnnnnnnnnnnnnnnnnnnnnnnnnnnnnnnnnnnnnnnnnnnnnnnnnnnnnnnnnnnnnnnnnnnnnnnnnnnnnnnnnnnnnnnnnnnnnnnnnnnnnnnnnnnnnnnnnnnnnnnnnnnnnnnnnnnnnnnnnnnnnnnnnnnnnnnnnnnnnnnnnnnnnnnnnnnnnnnnnnnnnnnnnnnnnnnnnnnnnnnnnnnnnnnnnnnnnnnnnnnnnnnnnnnnnnnnnnnnnnnnnnnnnnnnnnnnnnnnnnnnnnnnnnnnnnnnnnnnnnnnnnnnnnnnnnnnnnnnnnnnnnnnnnnnnnnnnnnnnnnnnnnnnnnnnnnnnnnnnnnnnnnnnnnnnnnnnnnnnnnnnnnnnnnnnnnnnnnnnnnnnnnnnnnnnnnnnnnnnnnnnnnnnnnnnnnnnnnnnnnnnnnnnnnnnnnnnnnnnnnnnnnnnnnnnnnnnnnnnnnnnnnnnnnnnnnnnnnnnnnnnnnnnnnnnnnnnnnnnnnnnnnnnnnnnnnnnnnnnnnnnnnnnnnnnnnnnnnnnnnnnnnnnnnnnnnnnnnnnnnnnnnnnnnnnnnnnnnnnnnnnnnnnnnnnnnnnnnnnnnnnnnnnnnnnnnnnnnnnnnnnnnnnnnnnnnnnnnnnnnnnnnnnnnnnnnnnnnnnnnnnnnnnnnnnnnnnnnnnnnnnnnnnnnnnnnnnnnnnnnnnnnnnnnnnnnnnnnnnnnnnnnnnnnnnnnnnnnnnnnnnnnnnnnnnnnnnnnnnnnnnnnnnnnnnnnnnnnnnnnnnnnnnnnnnnnnnnnnnnnnnnnnnnnnnnnnnnnnnnnnnnnnnnnnnnnnnnnnnnnnnnnnnnnnnnnnnnnnnnnnnnnnnnnnnnnnnnnnnnnnnnnnnnnnnnnnnnnnnnnnnnnnnnnnnnnnnnnnnnnnnnnnnnnnnnnnnnnnnnnnnnnnnnnnnnnnnnnnnnnnnnnnnnnnnnnnnnnnnnnnnnnnnnnnnnnnnnnnnnnnnnnnnnnnnnnnnnnnnnnnnnnnnnnnnnnnnnnnnnnnnnnnnnnnnnnnnnnnnnnnnnnnnnnnnnnnnnnnnnnnnnnnnnnnnnnnnnnnnnnnnnnnnnnnnnnnnnnnnnnnnnnnnnnnnnnnnnnnnnnnnnnnnnnnnnnnnnnnnnnnnnnnnnnnnnnnnnnnnnnnnnnnnnnnnnnnnnnnnnnnnnnnnnnnnnnnnnnnnnnnnnnnnnnnnnnnnnnnnnnnnnnnnnnnnnnnnnnnnnnnnnnnnnnnnnnnnnnnnnnnnnnnnnnnnnnnnnnnnnnnnnnnnnnnnnnnnnnnnnnnnnnnnnnnnnnnnnnnnnnnnnnnnnnnnnnnnnnnnnnnnnnnnnnnnnnnnnnnnnnnnnnnnnnnnnnnnnnnnnnnnnnnnnnnnnnnnnnnnnnnnnnnnnnnnnnnnnnnnnnnnnnnnnnnnnnnnnnnnnnnnnnnnnnnnnnnnnnnnnnnnnnnnnnnnnnnnnnnnnnnnnnnnnnnnnnnnnnnnnnnnnnnnnnnnnnnnnnnnnnnnnnnnnnnnnnnnnnnnnnnnnnnnnnnnnnnnnnnnnnnnnnnnnnnnnnnnnnnnnnnnnnnnnnnnnnnnnnnnnnnnnnnnnnnnnnnnnnnnnnnnnnnnnnnnnnnnnnnnnnnnnnnnnnnnnnnnnnnnnnnnnnnnnnnnnnnnnnnnnnnnnnnnnnnnnnnnnnnnnnnnnnnnnnnnnnnnnnnnnnnnnnnnnnnnnnnnnnnnnnnnnnnnnnnnnnnnnnnnnnnnnnnnnnnnnnnnnnnnnnnnnnnnnnnnnnnnnnnnnnnnnnnnnnnnnnnnnnnnnnnnnnnnnnnnnnnnnnnnnnnnnnnnnnnnnnnnnnnnnnnnnnnnnnnnnnnnnnnnnnnnnnnnnnnnnnnnnnnnnnnnnnnnnnnnnnnnnnnnnnnnnnnnnnnnnnnnnnnnnnnnnnnnnnnnnnnnnnnnnnnnnnnnnnnnnnnnnnnnnnnnnnnnnnnnnnnnnnnnnnnnnnnnnnnnnnnnnnnnnnnnnnnnnnnnnnnnnnnnnnnnnnnnnnnnnnnnnnnnnnnnnnnnnnnnnnnnnnnnnnnnnnnnnnnnnnnnnnnnnnnnnnnnnnnnnnnnnnnnnnnnnnnnnnnnnnnnnnnnnnnnnnnnnnnnnnnnnnnnnnnnnnnnnnnnnnnnnnnnnnnnnnnnnnnnnnnnnnnnnnnnnnnnnnnnnnnnnnnnnnnnnnnnnnnnnnnnnnnnnnnnnnnnnnnnnnnnnnnnnnnnnnnnnnnnnnnnnnnnnnnnnnnnnnnnnnnnnnnnnnnnnnnnnnnnnnnnnnnnnnnnnnnnnnnnnnnnnnnnnnnnnnnnnnnnnnnnnnnnnnnnnnnnnnnnnnnnnnnnnnnnnnnnnnnnnnnnnnnnnnnnnnnnnnnnnnnnnnnnnnnnnnnnnnnnnnnnnnnnnnnnnnnnnnnnnnnnnnnnnnnnnnnnnnnnnnnnnnnnnnnnnnnnnnnnnnnnnnnnnnnnnnnnnnnnnnnnnnnnnnnnnnnnnnnnnnnnnnnnnnnnnnnnnnnnnnnnnnnnnnnnnnnnnnnnnnnnnnnnnnnnnnnnnnnnnnnnnnnnnnnnnnnnnnnnnnnnnnnnnnnnnnnnnnnnnnnnnnnnnnnnnnnnnnnnnnnnnnnnnnnnnnnnnnnnnnnnnnnnnnnnnnnnnnnnnnnnnnnnnnnnnnnnnnnnnnnnnnnnnnnnnnnnnnnnnnnnnnnnnnnnnnnnnnnnnnnnnnnnnnnnnnnnnnnnnnnnnnnnnnnnnnnnnnnnnnnnnnnnnnnnnnnnnnnnnnnnnnnnnnnnnnnnnnnnnnnnnnnnnnnnnnnnnnnnnnnnnnnnnnnnnnnnnnnnnnnnnnnnnnnnnnnnnnnnnnnnnnnnnnnnnnnnnnnnnnnnnnnnnnnnnnnnnnnnnnnnnnnnnnnnnnnnnnnnnnnnnnnnnnnnnnnnnnnnnnnnnnnnnnnnnnnnnnnnnnnnnnnnnnnnnnnnnnnnnnnnnnnnnnnnnnnnnnnnnnnnnnnnnnnnnnnnnnnnnnnnnnnnnnnnnnnnnnnnnnnnnnnnnnnnnnnnnnnnnnnnnnnnnnnnnnnnnnnnnnnnnnnnnnnnnnnnnnnnnnnnnnnnnnnnnnnnnnnnnnnnnnnnnnnnnnnnnnnnnnnnnnnnnnnnnnnnnnnnnnnnnnnnnnnnnnnnnnnnnnnnnnnnnnnnnnnnnnnnnnnnnnnnnnnnnnnnnnnnnnnnnnnnnnnnnnnnnnnnnnnnnnnnnnnnnnnnnnnnnnnnnnnnnnnnnnnnnnnnnnnnnnnnnnnnnnnnnnnnnnnnnnnnnnnnnnnnnnnnnnnnnnnnnnnnnnnnnnnnnnnnnnnnnnnnnnnnnnnnnnnnnnnnnnnnnnnnnnnnnnnnnnnnnnnnnnnnnnnnnnnnnnnnnnnnnnnnnnnnnnnnnnnnnnnnnnnnnnnnnnnnnnnnnnnnnnnnnnnnnnnnnnnnnnnnnnnnnnnnnnnnnnnnnnnnnnnnnnnnnnnnnnnnnnnnnnnnnnnnnnnnnnnnnnnnnnnnnnnnnnnnnnnnnnnnnnnnnnnnnnnnnnnnnnnnnnnnnnnnnnnnnnnnnnnnnnnnnnnnnnnnnnnnnnnnnnnnnnnnnnnnnnnnnnnnnnnnnnnnnnnnnnnnnnnnnnnnnnnnnnnnnnnnnnnnnnnnnnnnnnnnnnnnnnnnnnnnnnnnnnnnnnnnnnnnnnnnnnnnnnnnnnnnnnnnnnnnnnnnnnnnnnnnnnnnnnnnnnnnnnnnnnnnnnnnnnnnnnnnnnnnnnnnnnnnnnnnnnnnnnnnnnnnnnnnnnnnnnnnnnnnnnnnnnnnnnnnnnnnnnnnnnnnnnnnnnnnnnnnnnnnnnnnnnnnnnnnnnnnnnnnnnnnnnnnnnnnnnnnnnnnnnnnnnnnnnnnnnnnnnnnnnnnnnnnnnnnnnnnnnnnnnnnnnnnnnnnnnnnnnnnnnnnnnnnnnnnnnnnnnnnnnnnnnnnnnnnnnnnnnnnnnnnnnnnnnnnnnnnnnnnnnnnnnnnnnnnnnnnnnnnnnnnnnnnnnnnnnnnnnnnnnnnnnnnnnnnnnnnnnnnnnnnnnnnnnnnnnnnnnnnnnnnnnnnnnnnnnnnnnnnnnnnnnnnnnnnnnnnnnnnnnnnnnnnnnnnnnnnnnnnnnnnnnnnnnnnnnnnnnnnnnnnnnnnnnnnnnnnnnnnnnnnnnnnnnnnnnnnnnnnnnnnnnnnnnnnnnnnnnnnnnnnnnnnnnnnnnnnnnnnnnnnnnnnnnnnnnnnnnnnnnnnnnnnnnnnnnnnnnnnnnnnnnnnnnnnnnnnnnnnnnnnnnnnnnnnnnnnnnnnnnnnnnnnnnnnnnnnnnnnnnnnnnnnnnnnnnnnnnnnnnnnnnnnnnnnnnnnnnnnnnnnnnnnnnnnnnnnnnnnnnnnnnnnnnnnnnnnnnnnnnnnnnnnnnnnnnnnnnnnnnnnnnnnnnnnnnnnnnnnnnnnnnnnnnnnnnnnnnnnnnnnnnnnnnnnnnnnnnnnnnnnnnnnnnnnnnnnnnnnnnnnnnnnnnnnnnnnnnnnnnnnnnnnnnnnnnnnnnnnnnnnnnnnnnnnnnnnnnnnnnnnnnnnnnnnnnnnnnnnnnnnnnnnnnnnnnnnnnnnnnnnnnnnnnnnnnnnnnnnnnnnnnnnnnnnnnnnnnnnnnnnnnnnnnnnnnnnnnnnnnnnnnnnnnnnnnnnnnnnnnnnnnnnnnnnnnnnnnnnnnnnnnnnnnnnnnnnnnnnnnnnnnnnnnnnnnnnnnnnnnnnnnnnnnnnnnnnnnnnnnnnnnnnnnnnnnnnnnnnnnnnnnnnnnnnnnnnnnnnnnnnnnnnnnnnnnnnnnnnnnnnnnnnnnnnnnnnnnnnnnnnnnnnnnnnnnnnnnnnnnnnnnnnnnnnnnnnnnnnnnnnnnnnnnnnnnnnnnnnnnnnnnnnnnnnnnnnnnnnnnnnnnnnnnnnnnnnnnnnnnnnnnnnnnnnnnnnnnnnnnnnnnnnnnnnnnnnnnnnnnnnnnnnnnnnnnnnnnnnnnnnnnnnnnnnnnnnnnnnnnnnnnnnnnnnnnnnnnnnnnnnnnnnnnnnnnnnnnnnnnnnnnnnnnnnnnnnnnnnnnnnnnnnnnnnnnnnnnnnnnnnnnnnnnnnnnnnnnnnnnnnnnnnnnnnnnnnnnnnnnnnnnnnnnnnnnnnnnnnnnnnnnnnnnnnnnnnnnnnnnnnnnnnnnnnnnnnnnnnnnnnnnnnnnnnnnnnnnnnnnnnnnnnnnnnnnnnnnnnnnnnnnnnnnnnnnnnnnnnnnnnnnnnnnnnnnnnnnnnnnnnnnnnnnnnnnnnnnnnnnnnnnnnnnnnnnnnnnnnnnnnnnnnnnnnnnnnnnnnnnnnnnnnnnnnnnnnnnnnnnnnnnnnnnnnnnnnnnnnnnnnnnnnnnnnnnnnnnnnnnnnnnnnnnnnnnnnnnnnnnnnnnnnnnnnnnnnnnnnnnnnnnnnnnnnnnnnnnnnnnnnnnnnnnnnnnnnnnnnnnnnnnnnnnnnnnnnnnnnnnnnnnnnnnnnnnnnnnnnnnnnnnnnnnnnnnnnnnnnnnnnnnnnnnnnnnnnnnnnnnnnnnnnnnnnnnnnnnnnnnnnnnnnnnnnnnnnnnnnnnnnnnnnnnnnnnnnnnnnnnnnnnnnnnnnnnnnnnnnnnnnnnnnnnnnnnnnnnnnnnnnnnnnnnnnnnnnnnnnnnnnnnnnnnnnnnnnnnnnnnnnnnnnnnnnnnnnnnnnnnnnnnnnnnnnnnnnnnnnnnnnnnnnnnnnnnnnnnnnnnnnnnnnnnnnnnnnnnnnnnnnnnnnnnnnnnnnnnnnnnnnnnnnnnnnnnnnnnnnnnnnnnnnnnnnnnnnnnnnnnnnnnnnnnnnnnnnnnnnnnnnnnnnnnnnnnnnnnnnnnnnnnnnnnnnnnnnnnnnnnnnnnnnnnnnnnnnnnnnnnnnnnnnnnnnnnnnnnnnnnnnnnnnnnnnnnnnnnnnnnnnnnnnnnnnnnnnnnnnnnnnnnnnnnnnnnnnnnnnnnnnnnnnnnnnnnnnnnnnnnnnnnnnnnnnnnnnnnnnnnnnnnnnnnnnnnnnnnnnnnnnnnnnnnnnnnnnnnnnnnnnnnnnnnnnnnnnnnnnnnnnnnnnnnnnnnnnnnnnnnnnnnnnnnnnnnnnnnnnnnnnnnnnnnnnnnnnnnnnnnnnnnnnnnnnnnnnnnnnnnnnnnnnnnnnnnnnnnnnnnnnnnnnnnnnnnnnnnnnnnnnnnnnnnnnnnnnnnnnnnnnnnnnnnnnnnnnnnnnnnnnnnnnnnnnnnnnnnnnnnnnnnnnnnnnnnnnnnnnnnnnnnnnnnnnnnnnnnnnnnnnnnnnnnnnnnnnnnnnnnnnnnnnnnnnnnnnnnnnnnnnnnnnnnnnnnnnnnnnnnnnnnnnnnnnnnnnnnnnnnnnnnnnnnnnnnnnnnnnnnnnnnnnnnnnnnnnnnnnnnnnnnnnnnnnnnnnnnnnnnnnnnnnnnnnnnnnnnnnnnnnnnnnnnnnnnnnnnnnnnnnnnnnnnnnnnnnnnnnnnnnnnnnnnnnnnnnnnnnnnnnnnnnnnnnnnnnnnnnnnnnnnnnnnnnnnnnnnnnnnnnnnnnnnnnnnnnnnnnnnnnnnnnnnnnnnnnnnnnnnnnnnnnnnnnnnnnnnnnnnnnnnnnnnnnnnnnnnnnnnnnnnnnnnnnnnnnnnnnnnnnnnnnnnnnnnnnnnnnnnnnnnnnnnnnnnnnnnnnnnnnnnnnnnnnnnnnnnnnnnnnnnnnnnnnnnnnnnnnnnnnnnnnnnnnnnnnnnnnnnnnnnnnnnnnnnnnnnnnnnnnnnnnnnnnnnnnnnnnnnnnnnnnnnnnnnnnnnnnnnnnnnnnnnnnnnnnnnnnnnnnnnnnnnnnnnnnnnnnnnnnnnnnnnnnnnnnnnnnnnnnnnnnnnnnnnnnnnnnnnnnnnnnnnnnnnnnnnnnnnnnnnnnnnnnnnnnnnnnnnnnnnnnnnnnnnnnnnnnnnnnnnnnnnnnnnnnnnnnnnnnnnnnnnnnnnnnnnnnnnnnnnnnnnnnnnnnnnnnnnnnnnnnnnnnnnnnnnnnnnnnnnnnnnnnnnnnnnnnnnnnnnnnnnnnnnnnnnnnnnnnnnnnnnnnnnnnnnnnnnnnnnnnnnnnnnnnnnnnnnnnnnnnnnnnnnnnnnnnnnnnnnnnnnnnnnnnnnnnnnnnnnnnnnnnnnnnnnnnnnnnnnnnnnnnnnnnnnnnnnnnnnnnnnnnnnnnnnnnnnnnnnnnnnnnnnnnnnnnnnnnnnnnnnnnnnnnnnnnnnnnnnnnnnnnnnnnnnnnnnnnnnnnnnnnnnnnnnnnnnnnnnnnnnnnnnnnnnnnnnnnnnnnnnnnnnnnnnnnnnnnnnnnnnnnnnnnnnnnnnnnnnnnnnnnnnnnnnnnnnnnnnnnnnnnnnnnnnnnnnnnnnnnnnnnnnnnnnnnnnnnnnnnnnnnnnnnnnnnnnnnnnnnnnnnnnnnnnnnnnnnnnnnnnnnnnnnnnnnnnnnnnnnnnnnnnnnnnnnnnnnnnnnnnnnnnnnnnnnnnnnnnnnnnnnnnnnnnnnnnnnnnnnnnnnnnnnnnnnnnnnnnnnnnnnnnnnnnnnnnnnnnnnnnnnnnnnnnnnnnnnnnnnnnnnnnnnnnnnnnnnnnnnnnnnnnnnnnnnnnnnnnnnnnnnnnnnnnnnnnnnnnnnnnnnnnnnnnnnnnnnnnnnnnnnnnnnnnnnnnnnnnnnnnnnnnnnnnnnnnnnnnnnnnnnnnnnnnnnnnnnnnnnnnnnnnnnnnnnnnnnnnnnnnnnnnnnnnnnnnnnnnnnnnnnnnnnnnnnnnnnnnnnnnnnnnnnnnnnnnnnnnnnnnnnnnnnnnnnnnnnnnnnnnnnnnnnnnnnnnnnnnnnnnnnnnnnnnnnnnnnnnnnnnnnnnnnnnnnnnnnnnnnnnnnnnnnnnnnnnnnnnnnnnnnnnnnnnnnnnnnnnnnnnnnnnnnnnnnnnnnnnnnnnnnnnnnnnnnnnnnnnnnnnnnnnnnnnnnnnnnnnnnnnnnnnnnnnnnnnnnnnnnnnnnnnnnnnnnnnnnnnnnnnnnnnnnnnnnnnnnnnnnnnnnnnnnnnnnnnnnnnnnnnnnnnnnnnnnnnnnnnnnnnnnnnnnnnnnnnnnnnnnnnnnnnnnnnnnnnnnnnnnnnnnnnnnnnnnnnnnnnnnnnnnnnnnnnnnnnnnnnnnnnnnnnnnnnnnnnnnnnnnnnnnnnnnnnnnnnnnnnnnnnnnnnnnnnnnnnnnnnnnnnnnnnnnnnnnnnnnnnnnnnnnnnnnnnnnnnnnnnnnnnnnnnnnnnnnnnnnnnnnnnnnnnnnnnnnnnnnnnnnnnnnnnnnnnnnnnnnnnnnnnnnnnnnnnnnnnnnnnnnnnnnnnnnnnnnnnnnnnnnnnnnnnnnnnnnnnnnnnnnnnnnnnnnnnnnnnnnnnnnnnnnnnnnnnnnnnnnnnnnnnnnnnnnnnnnnnnnnnnnnnnnnnnnnnnnnnnnnnnnnnnnnnnnnnnnnnnnnnnnnnnnnnnnnnnnnnnnnnnnnnnnaggtatatctatatatatctatattaaagtatataattaccttaattattctttagtttttaataatactatttaatattctagttaagattaggatatataggagattaaaggttattataaaagctttatttactatagtataatataaataccctaaattaactaatatctttaagaattaaattctatttattaataaattaatatagaagggtttattttcttattttaataatttattagccccttttaattcctatctatatctttagataggaattactttttttctaagtctctattaatactctttagattagattaattactttcttccttaaatagttctatctaggtttctattcttataatatatattctttctctttacttataatagtatatagggccttttttaataatagctactattacctagagatattaatataagtttattatatattttagtctttttactaagaaaagagggtaggaatatatactatatctattatatctatagtaatagtatctcctttcctagtatttatattctaattctttttctttaatctattttacttattttctaataaggtcttagtcctcttttctaatttataagaaagtaattataactataaggattagtaactattctatataattatctataaaggactagagatatattactttcctttcttagtaatttaaggtttactttatctctaataatagtaagtctatattagtattaatttaatatagtagtaggattaacttaattagattattaaagagattttagtaagaaaagactatatagataattaggtttagtaatctaattaaaaggaatacttttatatcttctagttaatctattacttttaaattagtaaattcttttttaaaggtaaataggaatatagtaaaagactactttagtccttactatatttttctaagatactaagtagctcttttcttaatatttagatctttataaatatcttctagatattaaaggaattcttttataattttatttacctattagtattatataaatataatagtatttttatttatatttccttctagctataagtaggtataaagtatatatacctagttatctctaagggtatcttagttaattactaatttatttttaattaataatttaaatataggctattctattctaactcctttaaaggttaagggattagagagatataactatagttatatagtttatcttatttctaataacccttaggtaggcttatttttagtcttattattcttattagattcttcttatactattatatttatttagactagctctttaagcttcttaatcctttcctcttatacttatataatctcttcctaggaggtagtagattagactaattactatattattactttagcctatttaggtagttctaattattctatattctcgtttattatactatttatcggtatatccttctatactcttctgatcttctatagaaaaggaagcttttagaatataaagggatagagctagattagaatttaagctaactaagccgtttactattatctaaaagcttaaggaaaggaaataaagcttataggaagaaacgggagaaaataggggtagtaaaggtcatatacttattatataatcctatataggctctggcccattatataggggtagaatatagtcgataactagtatttaactataaagagaaagtagaaggttaactagaattagctaataaaaaggctacccctattacttactaggttcttnnnnnnnnnnnnnnnnnnnnnnnnnnnnnnnnnnnnnnnnnnnnnnnnnnnnnnnnnnnnnnnnnnnnnnnnnnnnnnnnnnnnnnnnnnnnnnnnnnnnnnnnnnnnnnnnnnnnnnnnnnnnnnnnnnnnnnnnnnnnnnnnnnnnnnnnnnnnnnnnnnnnnnnnnnnnnnnnnnnnnnnnnnnnnnnnnnnnnnnnnnnnnnnnnnnnnnnnnnnnnnnnnnnnnnnnnnnnnnnnnnnnnnnnnnnnnnnnnnnnnnnnnnnnnnnnnnnnnnnnnnnnnnnnnnnnnnnnnnnnnnnnnnnnnnnnnnnnnnnnnnnnnnnnnnnnnnnnnnnnnnnnnnnnnnnnnnnnnnnnnnnnnnnnnnnnnnnnnnnnnnnnnnnnnnnnnnnnnnnnnnnnnnnnnatgtatatatagtagaaaaatcctaatcaattctctaactctttaaaaataataatagtctagaaaatataataatctaatagataacttagtaatcaaataaataaaataaaatgaaaggatattttttaggtaaaaaactgtaggactggtttttcgggcagaaaaccatctgagttggtttttctatagaaaaccagcctagtcagtcacgtgacccaactgtatcagggatgaaaaatgacagtattcatcctagattctgacacttcttaattaggatttaatactaaattaggggggtagtagtacataggtaagtataaggaacgtcgaattcttatactaatagcgcaatttttggtttttttttctagaattccaggtagtaatagtaattactaaataagcctccgaatcttaggtttttttaggtatattggtaggtaaaaaattggtatagaaaatagtgactatttaaaatttttgttttataagagttttcacctagctgtagtaacttggcgagaaccgggtagtagcaaaagtacgtatataccgccattacacgctagtgttttttttaaaaaaaagccaaaaattgagtgagcaaaaacatttgcaatggacctggttcgttccattaaagatctaaaatggctgtatattgaaatattaaatacattatcacattactaccccgaggataataagtatcatgacacactcactggccaacatccaggaccgaagactgtagagaaatatccgaatagggatttgaagaggcaagcataatatgcacaaaaaaaggtaaacatacaaattgcttactgagccttcgaagcctttgccttgttttcccttcggcgcttcagcgcatctggggtgtactcggtgtcaaggacataatcccaccaccggaagctgctggaatagttgccgatgaacttctcatggtggagatcgtggtgatcggcaccagcccagaagggaaggaaatggtgaagactccatgggaattcataaccactgtgagcatcaatggcctggaacaagcgcaagacgatccagatgtacatggtcagaatgtgcagttcacctgtcatcgcacaccaaacgatcgggcacccgatagtcccgaagcccaggatcatcacttcaatcggtgaggcatattcagcagccaagccgaaaggcgccgagtactggtggtggattttgtgaatagccttatagaggggtccccaatgaagtgcacggtgggagaagtaatgccaggtatcctccatcacaaagaagattgcaatttgatatgccatagtccaaagggtaggaaatgggatcgaagttgaaagtccacaaaattgtgccaaggggtggaagagcctagcatttgttagatccttagaaatccctggatttggaaagagattcgagtcttaccagatctggggtagttcgacagtgaaatgactcaagagcacgaacttggcgcaatcccattgttcccgtagcgatggaatcttgttctgcatagtattagaggtgaaccagatgaggtttgaaaaaaaaaaaaaaaaagaaattctacttacaccttgaatcttgtagcggttgaacatggcgaatgtgtcgatgaaaatccagggtagtgagcgaccgaagtagaccagttcatgcatgacgaatgacatgattccagtggccaggacatcgttctgcatccaagcataccaggctgcccacaacctctctgccacattcaggttggcattgtatttgccaatctcttcgaactggccccagtatgtccccgaggacaagactgttgaattcctatatgggatgttagatactatgacaggtcgaggatgtgagcatcctacattgcaaaggttgttctctttttcagaaagtaaagagaagcccgaagtcagaaggcagaagtcagaaggcagaaggcaggaggcagaagtcagaggccagcagtcagaaagaataaaggggaaggtagacgtgaaaccaaagccagagcgtgattctatgtaaggttataaagaaaaaaagggataatcaagaagatcaaggacagtccaatcccgacgtggcgagatcaacttttccgccccccctgaacgtaggggtaaggccactggcaagccgatccccatccgagatcaccccacctgcatacaatccggtaatgcggatttcgctgcgttttgtttggttgaaagaacacggtgactccagccaaaaatccagaccccttactaagactgtttctagacatcttacgatcattttgtttgagattttggctttagagtaaatttaaagtaaatagagtagtttgtcactccgcacgataggctcagaaataaaagtgtagtttgcatagtttgtatgtttgcacagtttgcatgcttgcccacatatattcgtgtttatatgtttgcatgtttgcatagtttgcatgcttgcccacatattttcgtgtttatatgtttgtatgtttgtatatgacgacatcccttaatccttcaacttgttcatctccatacccaggtacgatggtcagctttcgagggtagctgcacctcaacgcattgaaagattctgggatgtctgttatacaagagtgagtgtgatataattcctgaaaaccaccttgtactcaaattactttcccacagaaccgtctgtggtgtcaacactcagcttgatcgccttcagcaacagatctcaagcccacagagattggaagccacagatatatccattgaatctcttgagtcaattggccaattgcaagatctcatcaactccatttcagtgacttccaagacccaatcccttctacctcctagtcggttggcagatttactctcgggtactttctctcgcctccaagtacagaccactctccatgaagagaatagtgcccaactctcggaccatgtatggatagcagccgcaaaggctgccgttcaggcatcaggactggtcatgaacagcctcctggatcaaacacttcaactgcacgatgagacctattactggggtgagatgctggggtctatctggtatagcggtctgtatacagtccagacatcaccagggcaattctaccgctggacgaaggatgcatgcgtcgctcaaatgtatcaagaagccccgtccatcactgccagctggtttcgattctaccagattgcccgccaaagtgcctggaaacttggaggacactccattcgcgctcatttgctatccccaattagatcatcccgggcagaaatgcgccagaaacgagatttgctcctgaaaatgaaagacctccatactagcagcctgggccttctaatggaaggatggcatcttttcgaagcaagtgactccgcgactttgaacccggggactatcaacccccaatggcgtactgccgttcacagagcagtggctctgattgaagccatttatcgtcatatagcacttgagcctagcactcacgaattggaacagggagtattcgctaccctggagagggatatcgacgtcactaaaatccacacacaaggggataattccgtgcatgaacctttggacttgatcgagcgacttgtgcatgttcttcgagaggagttaccaaaccataccacttcaatgtcactatttattcatcgtcacgggcgcccttcatgcatagtccgttattggctacctgtatcagccgctcttctttcaggaagtgcatcaatgaggtttttggccaatcgacaagaggaaatcatccagtggattgttgatatcggttccaccactgtcgatttctggggcaattgggttgtgcatcccgtccgaaaactcattgggacgatcagacatgacgaaaaaagcgagattgcaataatgagcaagaatagcctgctggctgatcgagcgagtctagagagaatggtagtggactttgtccgcgatcgcccggatctttaccagggtgtggtggcggataccaccaccatcattaattctgtcaaggagggtgatttgactcccgttctcaaagcatatgaaagggacctgcggtcgccattcgttggaaccgttagaggcgacctcgtccgtgcccttttgatccagatccagaagaccaaggtcgatgtggaaattgccatcagtggtattgatgctttgctgaagagtcaggagcttgtatttgggtatgtcagatcccctcccccctatgcttttttcaatcgttaatatcttttagatttgtggggttgactcctgggattttggtttcctttgcaactatgaggtggctgggtggtcttctcggcagccgacgaggtttgcgaaagggcaagcagcgacatgagctaagacgtggattgcggtatgatgctatcaaacttgtgtataatctcacaaggctaattctagtactttatatgcaggaatgtggctcgcattttgacttcttctgcggttctatcaaacgggactgtcgcttacaaggacgccgggcaattgatatgtgaggcagaggctctccttcagcatgttaagatgatttctggaagcatgcagtacgaagagttccgagaagacatccaggatctcttgaatgttcagaatggagtggacaagcaacttcgcgtaatcgaaaggatgagatgggcatatttccagtaggttggctacatgtattttgctatactacgtatcaacatacaactaagtatcagatatgtagttatgcaaataattcatgttttctatacagttgctgtcttaagagttgggagcccagaaatgtacaaaaacataccattgcattatattcgagacttggattgatatatgtgttttttaccaataagcaggacctatgtatatacattttctaaattatataccagtgtatgccaatatgtccactgtcagccttggaagttagtttactaccaccgggcatgatgctgcttacataacataccgagatcctccttaccgtaccgtcatcacctccactccgtaggtggtgcatcgttctacctcctttcccataaaacactcaaaaatctttactcctgtatgcttggtcgtggatcactgcttgaagtctacaatcctttcatatccctgtcctttgatcagattgggcagatcggttccagcattttacgaagctcctgataagtactcgtgaagtgaaaaccatcaacctaaaccacttgatcggattcatcctgcaacgactactcccactttacatcctaaatcatttgatcaaaaccaataccccttgtcacccgacttgacaaatctccggaccacctcggtctcctatccatcatccacggtgctactactagctttggcgcttaatttccactgaagtattgccataatcgataatggctggcacacggaattatgatttcctggttagtattcatggccgtccaaaattcgacaaatttccctataaagccccaacaatgttaactttgtcatagattaaactgttgttgatcggggactcaggcgtgggtaaatcatgttgtctactgcgattcagcgaagactctttcactccatcattcatcactacaatcgggattgacttcaaaattcgtacgatcgagttggacggcaagagagtgaagttgcagatctgggacactgcaggccaggagcgctttcgcaccatcacgacggcctactaccgaggtgccatgggtattctgttggtctacgacgtgacagatgaacgatcattccaaagtaagacccgcccgctccctctcccaattatgtctgaccttttttctttctttagacattcggacctggttttcaaacgtcgagcaacatgccagtgaaggtgtacacaagattctcatcggaaataagtgcgactgggaagaaaaaagggcagtttctattgagcaaggccaacagctcgccgatgaactcggcattcccttcctggaggtttcggccaagaacaacatcaacattgagaaggcgttctacagccttgcatcggatatcaagaaagggatggacacttccaagaccgaacaatctggttcccagggcgtcaatatagaccagcaaggctccggtccgaatggcaattctgggggcaagtgttgttagttgttgtatcactactctttgtcttttgcccatgatctcccccgtcgccgtgttttaagctaccacatgtttcttatttccccccgcgctttcttcttttccgtcgatatctcgtttttgttttactcgctacattatcatgtgccaagatctgaatgtccaagttttatgcctgaagagttggcgcctatggacattcgagtatcatacaaacttgtccatatcctgtgataccttgacgtagtttgtatacttttctacccgattctataatacattgtaggtacattgtaggtataatgtagcttgaaccggacgacccacttttcttgaatctttccattatttttttttttccctctttctcttttctcccttggataatcttctttatagttacttcatctcgaagttcatgaatagacccaagattgaagtctttatcacacaattgggacaatctcgttcaatcccactgttcccctcccccgaagttgcccctcccccaccaaaaaacccggaagactttctgtgctgggagtcttatacagtaaaatccgcccatgttctcaggattttaacatacccgacatagaagagaaacagagacagagaaaacaccaatcaacttttattacaaacacatcaaggtcctttctcatatcatgtctgacgcccgcagtttcactgctcgtccattgtcaaagcagcaggcacgcaaggacttcaaagatgcattccgtgtctatctatcttcctcttcgttagctgcgctaaggcttcaaacagagagcatctgcacgctgaggcaagccgatgggccgccgcagactgccatagcatggtatgcgtcagagaacatccagagcaccgtcatgcaaatatcaaggacactgcaagactgctatgacatcaagatcggagaaaaagtttctatcaccagggctgaaggttcgctagaaaatatcgacctagtgacattggcggactgttcagatcccgagaaaattgccaaacatggctcaatttcagaaagtgacagatcccactgggaatgggccttggatgaaaaacttctccgatgcgggtgtttgacgacgggcttgacttttgagctggagctcaagggccaacctaggagttttcgagtggttaacattcattcacacaaccctcactctcgtcatacactttttcaattcacagaggcttcgaaggtttcccttggcccagtcatagaaagaaaagaagaaaagtcctcagacatagccgtgcaatccactggtcttggaggcctatctcgccaaattgacgacatcaatgaatgcttgtctgattttaacattgatctgcggaagccagcaatgccatcattctatgagaacagcagagggattttactctatggaccaaaggggactggaaaaacaagtcttctggaacagatcgaaaaggccggctggaagcaaacattcaaaattggcatgtcaactttggggagaagtgtcaatgagggcgaggttaagctgcgcaatatctttcaggaggcggctcgctctaaccccagtgtcatcattatcgaccagttggaatttattgcccctaagcgaacctcggttgaatctcagtcccttgcgtctgtcctttgcgagaatttagatgctatccgaaataaatcgattctcgtggtagccgcaacaagaaatcccaatcaagtcgatgacgccctcagaacgcctcatcgacttggaacagaaattgagatacaagtccctaccgctcaggaccgagctgaaatactacatgccattcgaggaccagtatctgccggtttgaccgacgagctagtagagatactagcagaaaagacacacggatacgttggagctgacctttttgccctcctgcaattggtctgtcgcaaagcccgacaacgacaactgttggacaaaagctccacagccatatcgaccagcccgatcgaccagtatagctcgctccatggaggttccagcgatgatgaattggccatctcattggagatacaagaaacagatatcttgctttccctgcaggaaatccgtcccacggccatgcgggaagtattcttggaaactccaaaggtgagatggtcggacattggtggacagcatgatattaaaaagcgcctccagcaagccgttgagcgacccctgaaggtgagatttatattcgaatacctgaaaacccttgccttcaagactaatttcccctttcaacccttagtatcctcaacggatgcgcagacttaacgtgaacagtaaaaagggtgttctactttatgggcctccaggttgttccaagacactgacagtcaaagccctagccacagaggccggattgaatttcctggcagtcaagggcgcagagattctcagcatgtacgttggagagtctgagcgatcattgagagagatcttcagaaaggcccgagcagcacgaccaagtatcatattctttgatgagattgatgccattgctgctcgacgaagcagtacttcgggaggtgtcaatgttcttacgactttgctaaacgaaatggacggtattgaggagctccgaaacgtgttggtcattgctgcaacaaacaagcccgatgtcttggaccctgcattgatgcgaccagggagattggacaatattctttacattggccctcccgactttgaggcgcgtagggaaatcctgcgcatctggaccaagaagtctgtggtgaacccagatgtcgacttggataatctggcatctctgaccgagggctattctggtgccgagattgtgagcatctgtgaaactgcaggagatgcagcactcgatgaggaggaggaaactcagcaggagcaagacgtgcagtggaagcatttccaatatgcactgggacaagtgcggcggcaaatcacggatactgtcatccaagagtatgagagatggagagagggctataggtaaatacctacatatgtagactttactgtataataagagctataagtccttgaagccatttaaagaaaggtgaagtgagttgaagttcgtataaagtgtccctaggtgattaccgaatcaagttagtgccaaaatgcataacatcccttccctcaaacctcctctcttctcttttctctctcttggcataatatcctaagttcttcctttttatctctttcgactttcatattccaattctccattacctagctacttcctctacatatccaatttgtaccacttgaagccctgtgatccatttagcgcgccgtgcgctaaatcttcaacatgtcctcgagatcagctcgtggacaatcacctctccgttcaccagaacaggaccaagcacggtcccgttctttacatcgttctaaacctcgaagtgagagcccatcccgaagcctcacacgaagtccatcacaaggacgtcacgatcgctatcgttcaagaacccgatcccgatccccgtctcgtggcagaacccgatctcgcagtcccagccgagctggtcgccgtcacaatagccggagcgaaagccgctcaattacacccaacgctagccctccgagaagttctaaggtaagtgccagtctgttcctgctgtgatatagctgtctcccccccatggcggaaccatatctatgaaactaaaagctgatttccctttttcttaacagatcgtggtagaaaaattgacaaagaatgtcacagaaaatcacattcgagagatattcgggggttttggagagatagagtacctcgatcttccaatcaacaaagcttgtaagactcgctttttgactcgcgattccagattcatatgtctcctaacactcttacagtcatgacaaataggggaactgcgtatatcatttattacgaccccgctgatgcggaggcagccattgcccacatgcacgaggctcagcttgacggggccatcctaaatgtctcaatcgttcttcctcgccgtaaattctcacgctcgccaccccctgcgtcgaatcgagtgaatggcggccgccccagatacggcagagtcccatatgcaggcccatcatcacccagacggcacggaggcggtcgacctacagaccgccatgacatttataggcccaagactgcatcaagatcacgatctcctgttcgttctcggtcatactcctctagatctcgctcaccggcgctgcgcagaggtagtccccgtacagaatcgcgacatcaccggcgccggagcccaagctacagcagctatggttacagcagtcgaagtcgcagtccaaaccggaaccgagggcacaatcgaaagtaaacagcgagagttttgcggtaccgttccttgttgtgtatcggttcaactctagcgggggattacgtttgatctttggtgccggcaaccgaattctatcgcaagatatccagagtagctagttctacgcaatagttaacaaattccactgccactttgaaatgtaaggattacaggatttctctaggtagtcagtatgtataataggatataccactagttaagtaatatatgatagaagcaaagaaacaggggaggatggtaggactacaattttgtatgcatgacttggatggaatgtatcacctccaataagagaaatcatcagaaaaacgaacaccatccgatgtacattgacgccagttttttcttatccgttgcttgtatgatcaattcatccacctgaccatccaccgaaagtgcaatgggctgcttagacatgaagccgcggagtttgtttcgaacatcttccaaaacgccagccggtgtgtccgggacatttacatgggtgcgccgctaggataaagagagacttgttaggaggttgcttgctgggaaccggtgttgaaatgtactcactctcttcccaataaaatcagttgttggatcatgcaaaaacgtctcgagtacagtcatcaaggcatcctcattttgtcgcagcaggctaagtgtaatctcacaagtccttctgaagggacctataccttggagattagcgtaggagtaaaactcgaggatatcttcaaactaaccattgtacccgtaagcgccaaaggcatcaaccatgttatgagtcaatcggaatggtaccacctcgggcttttcgaacgtatgacccttgtcaaagagacagttaaaatcaacatgtaggaggccgcctgttccttcttcgaatgaaaggttctcgccatgtcgatcgcccagacttgtgtagaaaagaaaactggttagcgcgatggaactctagggcattaggcgaaagcagatggagggccctcaaaacattaaatggcgagagaacatacccaagaacatatcccaccattgacatcacagcagaagaccgtgtataccttagtctcgctgtgaaccaagactctgtctcaggaaacatttcgatgaaccattcatgaaggaccggcgggagcctgcaactgtcagtacgctggactcatgggtgattgaacggaagatttacttggccagaatgttagtagtgaataagggcaactttgcgaaggttcgatcagcgcagatttcgttcaaatcatccctgatctcgtggaactattgcatacattaataccacagtccgagtattgtgttagatgtggtacccacgttcggttgaatgcctctttctcgtagcaacttgatgatgatatctctcattgtgcggagattatcaacccattcaatgagaccacattcctcattcagaggtgtcacagcgtatgtcttgatgtctgttggcgggttagcctttgtaattgcccaaagttcatcaaatcacttacacatgcgccgcttacttgattcaacgtctctttttaggaaccggttgatcatgttgttgaattccatgagacgttgatccttgcgtagatcatcttttggtttgcaaagtgcgttatagatcttcccatcagatcctcgtaggctgatcttgcgtggcttttgaagcgagctcaaaatctgtgcttcatccaaaacagctaatttcggttagtttgtctccgcgagaataggtagctaataacgtaccctcaatggttgttggatcccgaggaaaggccctgaaacctttaatatattcggtgttctgactagcagggagacttgggatcaacattgcctggaaagggaccactaatcggcatggcgcaactttatgattaaaccctagattacggccgagttggactcgagatgacttttcctccacaggagcaaggcagagttggagtagttcctctgagaactttgtaccttcagtgatcatgcgatggatttctgacgctgttgatgattccccctttgacttgctaccgtagtcctgaacaagttagtctctcataatctgtttcaggcggacgacacgtactatgatcttctgtaggcaattataaccccttttagttcgttctttattggaggacttgataacggcaagaactgtccagagaccttgctgtgggaaattatgaacagcctttgccacaatccgtgtcaacagatcatagactgtgatgttagggtgacagattctggcaaccacttgtggtaggattgtgaacagctacaactgttagctagctatccgggaaaatcacatttcgtaaactcaccagagccgcttgcaagcgtttgtcgatgaacttcttcagttgcgcatgcatctcaccgaggctcttcttgcgttgcgcttgtgtatgcctctgaaattccctagtgtgtgatgaatccgtcattagcaaacatttaccaatggccacaccacgaaactctttcttactcgttatcgcctctcttcgggtcaatgggctgttcaacaatcgaggcatgttcaagccaaagggtcagaagttttggtagagtctggaagacatatttggtcccatatgttagcgagcgaaggtaattgtcaatgacaagttttgtggcttctccactcaagctgtgtaatattggttagtctcaggtagggagtagcaggtctgatcaactgactatatctgagcttcctttcccataggcttcgctttctcggactctaaaattttgttgtaatgcttccctaggtaatagtgtgccctttcccacctgtttatccatcagaaaagaccatgttaaagcggcagtaatctaacttacttcggatacagcttgatagcctctcgatatctctgaacaatggcctgagagtgggtctggccagccctgtctgtccatttggctagcatcagatgagcctagacgcgttagtattctagtccatgtgaactgtatgcaacttacgagagcagtagactcattttgattctgcccacgaccagagagaaacgacatggcttcaatttcgactgaagaagatatattcggcgtaacttcgttggccgaaatcgcaccctctagagtctgaatggcttttcgatggtgtccatccttccaaaggagtcgcgcgtgctctatggaagccgacctgtctttcaaccgtgctgcattgagcatcgagtgatacgcttgactgttgaagttgcctttccttgaaagacgagcactggtgagccacgcagcggatatatcagaatccgcaaactcgcccctgtattccaattttagctatctatttcgtgttttgtaggctacgaactcacgctagctccattgtggctcgtcttaatcccaataggtattgtttatcggaaaggtagccacccaaaacatccaaccgtcggtctagggcacccagcaagcccgagcgtgattgacctgattgtgctttggcaatggattcgacctctgacaaagcatgtaaccgaagcatgtcattatggcatgcttgtagtgaggcaaccgaatttgtggtcagtgaccgggcaacgttgagcctgagctcgttgattttatcagtaaatgactcgtctttcttttgacgaagagcatcaagagccaagcctattccaacattgaactcttcagtgccttgtttggcacgaaggtcaagatatccctctagcttgtcccatctgctcattatccacgaagcttcaaccgcgaagggcaggaaccgtgaagccgccgactcattttctttgagaacctcgaaacgagtgagaacagcatctagataatggtgagcaagaagacagagcatgtaaaaactatctcatgtttgatctaaccttgttggccagattctttgagacaggtcacaagattccattgcgcatcgacgttgtcaggttccttctcgagttgtagctcgtaccaactctgcgccgtggcccatctcccagctttccggtgctcaaggatctgctggtcgatgtctagtgcggacaagtggcttgaaataccctcaattccatcgggttcatcaatctggctatagatgtcttgtaatctttggtatagaggctcgaggctggatctctcttgtgattccccgtgaaccttggattttcgaatgtactgttcccaatggaaaagtgccttggagaatgatttacattcaacagctcgcttagagatgatctcgggcggtattgaggacaagagattttcgacagacttgatctgcgatgagtatttgtcaatgagcgtgtcacggtttcgacctttatgggaacgactcgtatggttggaattgtgattgaggccatttaaatgctttttcttcccttgtaaccatcgagacagatagtctagcacttcaaagacgctctatcgaagaaagggaaatcgtcagtactgggaaaatcagtgaaattccacgaggattctgacctggctactgctcaaaattgtctcgcgagcattgttgtttgtctccggaatgggatgtgaaagaacactcatcaattcgtcttgaagattttgttgttcttgttcagtccctcccacgatacggttcaggactgtaaatggtaaaaggaacgaagagatggaaatatcttgacccttcacaacacgactcgatattgaaaagaccatttttgcgttgtctccattcccagtttgtagaagatcttgcaccagcgttcgaagccactcactgtgagtcaatctaggggaaaagagcggatagttaacctcagtatgattggccacaacagtgactgtataggtagatgtgagaaatggcgtaagagtgttgcgaatactttccggaagctccatccagcgttggtatttctcatcgccttgcaaatcgcgagagcgttgggtcattaccgcattcagtttgcaaaatttgagcaggccttgcatggcccatgccagaaaaccctgggccctagtattggaagcagacaagaatgcatcaaccaaaacatgctggaggaagaaaagaataaatgcgaccgtttcttccattctgtcaaagttggacaagacaagtatatccttcttctctttgatggtttcgactcggtttggatcgaggcagcccacaagccctaggcaccgagctgacaataaagtaatgctgtctgatgtggtactgaacttgacacaacagtccaacaatgacctagttaactgagcaatcacagggtctggttgttcactcagaacagagtcatggagaaattcttcatttgctgacagaaaaggggacaactccattagagcttgttcaacaacggtggcattttcgctctggcagcgacgaattaacgccagaaactggcttcgaacgtccatttgggctctcatgtcattaattttggcatcaaagacagccatctcaggaatggatgcaagggagggcatggtgttgaatgtatctcgtacaagactcgaatgattcgtcagaatatgatcgatgagttgacatgcgcggttcctgctctcgtcggtcagtttatcccaatatctgatcacaatcgctagcgtttgatcaattattggctcaaggtcctcttcgctaagagaacttatcaacgtcttccacgcggagaatgcataatcacacagttcctcgatctccagcgcagatcgaagacacgcacagacctgagatttttagtacctaaaattgattgattcgcaaggctgaatacatacttgaggcaatgcactgctaacatgaccctgggcgatattgatcatctcttcaatggctttgatgtttcttctcttctctgccaacgtttgcctcacttggaagtcattaatggcattcgcgaattgtgtgataataccgagaacgtgctcctcaatgaagtggcttagatccgctttctttgatgagcttccatgtgcaatctttcgcggaacaaacgtagctaatcgattcagagcttggttgaactgaaaactctcattagcggtccagaaggggtgggggaaaaaaagacataccctctctttcttttgctcgcccgcatcgccaaggctcttcagcaagtcacaagcaatgagaattggctcaatcctcaccaactccgccaaagaccgacccttaaatgcggggtctatgtctgctagaagagacatgatcataccctccgggttgtctgatttctgagataggaggaaagcaagaattgcagccaggttattcttctcagagcaaacatcaaaagcagactcgccttcattgcgactagccccaattctgcaaattatatctcgttttcgtgtcagaactaggtagggcaagatatggacttctgtcaaacgtaggaaaccatcaaccttcatgccaagcaaatcacatagctgttcagccatatacgggcgagattggaggtgcttgaccacagtcaccgatagggtcctccagtaaggccgaaagaggccagcaggtgtcaagaataattgttgggcaagtttagataactaaaatcagaggtgagctgtcaccatgtctgttgaaatgaagagcaaaagtaatcagaagtataatctcgggggtactcacctcgttataagccacagcgcaaatgtaggggtttggatgaccaaggtactccaagagccgaaggagaatgatgttcttctcttcatcttccgagccactagatacaaaaaattgtgagatgacatgatgataattttaggaaatagaaacgcacattgctagcccacagagtgttatgatacaagcttcctgtaatggcatatcatcttttccggaaagatttttgagccactcaagcacaacaacgaaattggcccgacgaatatcagttgataaatttgagcgcacaaaagctaccacggaatgtctatataatagtcagtatacagtgctagtgtgccttcaaggactatggaacgcacccagttgcaacacgcaattctctgattgagctgcggagcgagtgcagacagaattctccgaagtcagagtttggaatatgcatttgattggaatttggggcgtgcataagaattcttctgagtgcaatcattgcagatatccgaggaccaggcgtgcgtgtaagcctgggtaggatgaaattgaatagtgaccatatctcctcgaatccagaatgctcctcatttcccgcatgaccattctgatattgacccatatcgcatgtttgacaaagaagcgtgtctcgttttatgacatgcgaggacttcctcaaaagctgccctgccgttgcacagcagatttttcctaggatgtccaatagctcggtttttttagattcggacagttcctcgtaagatgcccttttacacaaataaatcagcatttcacaccttgaggggtatctgttgtccactcactggatggaggtgcgtagatctgccatcgttttgccacagtcagattgaagaatcgctgatatatttcccataagaaaaaaaaacaagccatgattagtaggtcctgcctctagtcctgggagacacagccgcttcgatgcccgggcatattcattcggctccgcttggtgtgaaaccccggctctctggaatgccgtatccgattcctcgtaaatttcccctattgaccctttaggtgagcacacagtcaacggtggtactgtatctagaagctgggcatgcaaggcctggagagaactctgatctggtattagctcggtgacccacctgtgctagacatgagataaagcttacccagagacacgactcaagggactggatgctggaattgtcgtctttgacattagttaacactggaagcagggtctccctcaattgttgtatcagaggctgagaagattttgcggtttctgtcaaatcgcgcaggaagcgacttagaatgacctgaacagaagacaactttcctatgttcccaaggctcagaaagccacacaggcattgggaccaagtataagtcaggctcatgtttgagagcagtccagccaaagtcgattctggtacacagcagcgatgcaaatgagtcaaatattgcagaggcacaattgcatcttccgaggtgagttgggctcctttcatttgcaaccactcgataacaacctgtctaaggcgatggaaaccattcaatacccacgagaagttttgccggaggatgaaatcatgatgttttacacaggattgcgtttcgcccttcggattgaacgaatcaagcaaccgagaggctagagagattgtctgcggaaagcctccaagggccgtaatgctcttgaataatccaggggggaggcctagactttgagtgtcctcaataagcgatccatttgcggcgggtatcgacaaccctccaaggcgtgtaccccaggaactgctacgttgaaatgtttccagagagcacaaaatatctagggaatgtcaatttggcccaaatttttacatcatcgggggctagaaacggacctgatgtgcaagcacgcaaaaacgcagcaacggcgtagcttgcaggcaatggacggactcgcttgaacttagaattagctaggcgcgcgcaaataagttgaatcttttcccggacaatctcggaggtccaggtggtggcgagtcggatcagtcgtaggattagccaagcgaataaaggagcatgtgtgtcctcacccaggatgatagggtcggagggttcccacagagcttggggggctttctcgatgctggcctgaataatatctaagcagtcgaggacttgcccttccagatcttgctctgatgtgctcccgtttgggctaatctctaagccggcctttaagacaatgcatatgagtttgttgacatcagtgacaccttcgtcaacgcgtagttgactttgtatctcactaaagatttcctcgcgaagctgggcgaatgtttcccgggttaagtgtgattcgtttccctgggttgcaagatgcggtacgaaacgcgaagcaaggatcgacgaggcaggttcagctctccaagcgttcccaggcgcggtagcctgctcattatctccctcgattgccatatgggagacacatgttcatgggaccaggtttaaaaagttcaatttctcgtgtttacacaaattccgaggccgggttgtgttcgtgtgggtgtttgaagtgcgcagatacgcggagagagttgatatgtcgattgacacctgaggcaccaagtatccactacacgcacacactctgtaatatcagagcttagttgtgatcattgaataccggtttgtaaattctatacattagccttatatctatcaagtcgagtataaaggcctgggatggtgtatggtcgggtcctctacatcgtgtatattgtagaaaatataaaagaattaaattcgaaaaaattcgaaatcgagacattatgatccaggaagtcttaagagagttaagagaattccggagtatgtgaatttcacatatcatgttgggccttgtgactcagagagttagtcaacctcactttgaaatttcaggtaccaccaccacctactccttaccctcttctaacatcacttcctaactctgagatacctcgccagtcaccgaagtcaactcagataagtgcaacatatacagaaaatatacatttcgaattggctatggagttcaagagtgactccgtaatggatgattcgagacatggatatttcatgaagcaagccttgttgatggtacgaaacttcttgatgccgggaaatcgaaaaatgctcattgaaaaaccagggcgagaaggctctccagtcaggcgagacacccgttggttgtgttctagtgtacaacgaccaaattgtgggggttggcatgaacgacacaaacagatccatgaatgtgggtggcttctaaagatcccattaaataccgctgaccatccccaagggaacgagacatgccgagtttatagcaattggagagatgctccaaagctactctaggtcggcattgcaatatactgatctttacgttacggtcgaaccctgtgtgatgtgtgcttctgccctgaagcagtaccgcatccgcagtgtgtactttgggtgcgccaatgatcgatttggaggcactggaggtgttctttcattacattccgagtcagtacatcccaagaaacgccgtcgaccgattgtgcagggctaatcggatacagctcctcaattgacccaccataccctgtctacggtgggctgttcaagacagaagcaatcatgttgctccgtcgtttttatatacaggagaacgaaaaaggtaggaattagcacgcacataccccaaccttgattacctgctgattacattgcagctcctaaccccagaccgaaaaagaatcgagagctgaatactagattcgaaaatggcaatgaagaagcgccccaaacctggtaggcggcaaggatgagatttagggggtctccaaaacatcattttactgcgcaatacctccagggctagtctgaatttgcccccgatacaagcggggaatcattactaccaaaggacatctccatataagtttgaaaagcgtcaatgttgatcagaacgggaatctgtattgtgaatatcaattgcgcccccaaaaacacacacaaaatgggatatgtgtacaaatctgcaacactgaacggaaaggctgcccatcattctttttttctttctagctgatggtgtatttcatgaagagccagtgcgctctgcctccaattcttgctcggcttgctggtagtatttggcagtgtccacgccatgctgatacaaaaaacaatcaacatcatccctcccaaatcgactcaaatggaggacttacctgatcgtggttgacaaagttgaaccatgggacaacatggatgaagagttctgagtaccgcgagttgcgggctgccatgccttgtagatgaggcgacatttgggatttaccgtacagaggctcgcccttcttgaccttatcgaccatctcacgagtatccatctcaacctccctagcattctcagtgaagccgtagaagcgctctgtgaaggtgtgagtgagatgtcatccaaaaaagcgggtcagagttcaagtggagggatatgacttacggcaggatcgctgatagagcacatgaagaccgccaagcagaccaacagctgtcgcgagtcgcataacaggagcgaagccaccacggcctacatgcgacggacttgctctctccatgatccagagcgagatgggagcagccgaggccattccgccagccacggcccagtcggaaggccgggcatatccgaacactcgtttcaaatgcctgaaaaagatataagcttgtgataaaatcctagaatccggggtaaagcgtacgggtcggaatcaatcaactgtgggatatgttagccaaagacatacgcaagcaatcgggaacggaaacagtagtagccccggttcatgttagatcaatcataccgggtagtcagtattggcccgcttagagggcacaatggctgttttggtatcggtcgccatgttgcttgaagtgtggatgtgcaagcattcgaggttgaagttctgggagttggaggagggcgaagctaaccttttggggactagcgcaatcaaggcggacaagaggtctgacagccaatcagagcgcatgtaacaggctactcgcgtcacgcgtcaaggtcgcatctgattgattgacattgaatttcaagatagcatcccataccgagtacgccgtacacaaagtccaactgctccaatccaacagccaggtttttcttttttctttttctttttcgttcaccttcagttatctggtccagtcaaatcgatcacttgatatagttgtacccacaacggtacctgcacgcgattagaaatatggcgaacgcgaatgtttcagagagaggaagctcaccaacagcagatgatttgaacgatctgtttgattatgacattggcttggatgagattattccggataataatgctcccaataccaacagcaccaaggcctctgggataggagattctgcacttggtttgggtcttgatgaagaagtcaaagtcgcaaagaaacgacaacctgtggctaaattagatgagggccggtgagtctcacttgctaccttctttcttgattgaaatctgttatttttttgttttgtttcgggagagcatttggggctgcaacaatgctgacgaataggctagtttactctcacaaccgggcatacccaaactacgacatactgctagacagaagctgaaattcaagggcaaaggatacgaggtttgttctcttgtctatccaaaattcctaatgcatggctagtgtaactgacttgagttcgctatagttcaaagacgccgcacgcctgctcaacttttaccagttatggctcgatgacctatttccacgcgcaaaattcgcagacggactgacaatgattgagaaactgggacactctaaacgcattcaaaccatgcgacgagaatggatagacgaggagaagctgagactgttcgatagctctggacccacgcgagaagagctcgaaaatcgccacgtccccacggaccctgcagattccaatcacaacccaaccgcgattattatgggccaggaagagattgccgaccaagacctatttattctagatccaaacgagagcgcggcgcctactgtcagctaccccgagcccgaggacgatgacttggaggatcttctcagagaacaagatgagccaatgtcagattttccacccgacaggcgtatctcatcttcacgagcaccagatgacgataacgactatgatgccgaatatgaagcgatgaaggagcttgggatgtagttgtggaaggcattttgtacgatgagtttttaatgacagcaatggtatatgtttaccccgggataaacccgctggttcctgtttaatcgtttcgtttcggctatgtagggctcagcttgggattggccgaatgagtctgaaactaaaattactaggaataccacattggatcacatttaaggaaaaagaattaatttcaaataacatgctaactgagtagaataactggagactgcaaagcaactcttcatgtactgccccggaaacgggacaagacgaagggagagaaagagacattagatgttacagtaaaggatgggccaattgaatatattgatctcacgcgctggcaggctccgtgaacacagagaactgaccaccggcacccgcccagttcaatttctttccacgagtagcagtgttatcgataacagtagccacctcgatgtcatcctgtgtaccttgtcccgtttgataggtagcagagaaaccccatgaccatgcacggccatcggaatcgatagcgagagaatgatccgaggcagccgccacaaccttggccttgatacccggaacaggggtaggcgcgatcaggatacgggggcgatcgcgctcatccttgataacggcgtcatcggaaagtgtatcgatcttaaggccgctttggaaaccgtcaagacggccccaaaccaagcattcaccatcgccagcaatggcaatcgaatgatgagcgccgccgcagatttgtgaaatatttttgtcagaaagtgattcgacaagagtgggatgcacgatagcagcttcatcgtcgccagcgccctcgcggagggcggttgcaccgaagctattcaatccccaggcatagaccttgccagtggcgtgaacagcaaacgagtggtacgagccactcccgatgtggacgatgttcttagggagaccgaactctcggggctgaagaccattcagcctgttgcgctccacgatcctgcgaccgagctgattctgttgtcctgagccccacgagtagacgcgaccttggtcgttcagggcaagaacgtgattagctccgcaagtcaggtgtttgatcttcttcaaagacgagatcaaagttgggatcgtttgaacgtgagaagacgcgtcaaatccgaggattccatcgttgctctagaatcgttgtcagtaaaagcaaagtaattcaaaacagtcagttcgtcttactcggaaggtgccccagccatagactagaccatcatcggtcaaggcaaagcttgcgctatcggcggcggcgacttcaacgaagacagtgccttcggggaaagcggtgacgggaatagcagtgggaatagactcccgggggtttaatccactgtcttcatcatcggaatcggaatcgctgtcgttctcaatgtccttgtatccaccgtcccattcagtttctcttccgagcgcaccctgatcgttcacaccccaggagaatatcttgttgtcatgcgttagagctagacagtgcatgccaccgacagcaacctgtacaactccgacttcttcggcagacagaagcttattcaaacgtgggcgcttcacatcgataacattcttagctgtgcccaaccccagctcaccagagctaccctcaccacagacgaatacattcagtttagttttcggggcctcgttgatgataactttgactttcggctttggctgacggggttgcgcgacacgagatcttttgatttcgcgaggtttctcctcatcttcatcagctttgcgcttcttcgtagcagaggtcaatttggtagatgttgccattttgcttggcttcgcagttgacttggtagatgttgcagtcggcttcgtagtggactttgtagtggactttgcagtagcctttgcagtcggctttgcggtaggtttttcaatggacttagtggtggattttgcagctgcctttgtagactctttcacgggggtttcggcctttgtcatagtgatctgcctggcgctggtgcgtagtcgagtacttctctttaccgtctcggttgaagcctcgacgggcttggacgtgttcttcttaggaggcattttgcctcaaactgggctattagaaatagcaaagaatgagaaagaacagggggtggggaggaatgtttgagactggaagaataaaagggaaaaggtatgtgaaggggaaaaaagagaaaaaaggacgccaagccaaaaacagccaaacaatagcacattctctccccagccacctcaatgggctgattcattgacattcgttgatttttattgatgattaacgcgttgttacgcgtgaatatgttttctttattgatctatctatgaattgaagagcattatagaattacaatagcccatcactgcatcaacggctggtttcttcacgaatctttccacacataatcacattttgtcccaatggcatccatttaacttctcgaggattcaacgcagcattgggtgtaccctcttgatcttgtttcgagtcagggctgacattcactccaccacggcccaggtaggtgggagcaaccgtgacaataatcgagtcaatgaagcttgtatactctggattcaacaattcactcagaaccgtaccaccgccttcaatcatgacacttttaatgccctccgatgccaaggcacgaaagatggcttcccagcgtaatcgccagtgttgattgtattctacaatgcggagaaaatctccaccgtagcctttgagcatcactagtgtctgagggttgatttgagctcctggggacaacacaacccatggagctttgccttttccttcaacggcagtacgtaacatccggcattcaggatgaataggccatcggcccataggatcaatgatcacgggccgtggttgccacattctccccaggcctccaaatccaccggccccttccagacggcagttcagacctggattatctgcaagaacagtccctactccaacaagaatggcatcgtgtcgggagcgaagataatgggtcatcaatttggcctccggtcccgacaataccgtctgcattcccggttgaagagaaatcttggagtccatcgacgatgcgtacgacaatgtgacatgggggaactctcggcgttccgagtgattaggaagataaggatgtaagaagtctagcgaaaactgagggaaggatagtgtgtccgggggcaaagctgacgagatcgaggttggttttgtttggggtgacacctcgttgacaccatcggtgctttgagttttaacaataccatggcccttttggtattcgtagccctcgtgtgcgaccagattcacctctgggttttgtatacgccacttggcggagatattgcggacgtccgtcacagtgaagaatcgcccgccagcctcaccaagcttatctggctcttcctgaaacttggtgtaaatggaagaagggagatatcccttcacagattctttgcgcgcgtactccattaatcccgagtttcgcttcactcggtcgatgtagtcgaggtcatgtgagtggatgctgcaactacccggcgttctcgcgatggtgacggtcgagtatgcgccttcaaaccggacaaccttgatttgaaagttacagatgcctccctctcggactcgctttttgcgagggcgcttgccttctggtaaggggcgagtttcagatgtgcggtgtgttggacgccgtaaacggcacatgtaatagtcggtggtgcaatggccctctttgctcgcatttgatctttgtttgacccatacattgtctataaaaggccaatatgtttcaaattcttcgagactgatttctatcgggtccttgcactcgaacaggaccttgcgtatgcgtgctaggttcggtggattgttgaaaaggcttggggtagccttcgcgccttgactcgttgatacgctgctgctgtgagcatctccgattgtcgcattgcgctgtgttgactcgttcccgtcaccgtgtaatgcttgtttatcaagggcaccggataaattgatgggggttgtgatttcgggcaggtcttcgtccgttgcgtctcgtgtatcgcaggcccgtccgatctcttgatctgttcccagaacgtctttcgcttgcaaagagactccgttgtgccgggatcccgcctcgctgccagaagcctctacgctcgagacggacacgtcggaggcatggtccatcctgggggagcgtggcaaaatatagctatagctccttattcctagctatggcgacaaatggccatttcactgcggagtagccctaaatagacacacacatatatatatacacgatatagagcaaagtgtcggagaacgagcctcgggaagaacttagtggggcggaaacatgaaggcccggagatgttatccacgttctgaggtcgagtacggagtatacatgtagtatatcaacagccaccacctacatgtaccaggggaacatagtccacagattgattcggtcttagaagtcaaatagaaatccataagaaataattgatcattgcatcttcgcttgattgtattgtcggagacaaataagcacaaaataagtattccagtatctcagtatctcaaatcacatctaatatgccccgatatctgccccagcacgagccagagtctcatagacccgtggtggcaatttgtacttgaccattcccgagaagaccatgagatccttggccatgacaagcaaagtatccgccaatccctggcgcacttcactgtcgtaaactccaaaggttcgtttttggcgttcatagccaatacatgtgatgctccacatgatgacaggtccgatgttgcgtgaaatgatgggtggcaaagacgaaaaagcttgggccgtgcttcgaatgtacgacacggagccctgagcttgcaaggggagaatattcaaagcgttgatagcctgtaacgttcattagtaattcaatcatgaaatagaaccatgggttggagacacctacatcaagagctggcgcccatctgccggcttcaacctgagtctttgcttcgatcatacgcaacagcaacccacaagcatcacggttgacctgtcggatttgcccgtaatacattatgtctgagtcgtaaagactgatcatgttcttggcaagcacgcccggatcatccacggtagtcaaactgaggctgctcccggcttccactgcctctggctggctatcttgattctggtcgacccttgggcgcaggggctgcagtttcggcatggcaccccctagttcaaccgcgattgcatctgacaatgcacggttgatgatgtcaatgacacgatcgtagttctctgccaagtggtacagaagcacggcatccgcgatcaatcccttatcatccgccacggcagcagcttgaacggtaatagtcttcaagaattcttgctggtcgaccaacttgatcaaatcgagacgttgctcaatggctcccttgaggcgagtaccgtccgcccgaatatcgccaagcaatttggcaaagtccctggtttctagaatgaactctcgcaaggcctcatggcagactgatgcttgggacttgcccagagcgcctggaagatctgcgttgaggcagatcagtgtaaagtaatcgatggcagcttcgacaaatccagtgcggaattctcgggtgtattgggtcaagagatatccgaaattgatctgggggtattgcttgactgtaaaggaaactgcaaagggagaaaattttaggtcagcaagatcataatatcatgacagaagataggcttacgaatttcttcaccagaggtgtaaaagtcggaaacgcgcaaaagaccataataggatagggcgatggcaaagtgaacagcagtgactggggcataggtgccgagataatgcacagcctgctcaaacattcctcccaatatctgcagcaggaagtaagttccatagccaccgggtccctcattgcccttgatgaagactctttggccaatttcctggatgtcggtttgaatatcctccaggccgaagacatcacctgcaacctcttcggcgcggtcatcctctcttgcaaggctgaattgtagccacatccagtcctcgacagtctgcttaacaccatccaagcgacgacgggatagatcacagcggccaattatcttgtagcacgccattcggtaaggatcgactgtattttcaggtgcgttccgcgatcgttgctggaactcgccattgatcttttgctgcaagtccctgggcagtctcctactctgcgcgtaggttgtcatgtaggtcacaaatttgtgatctaaagaccggaacccgctgtcccgactcacgtattcagcagcctcagtgacaaagccacatcgaagaaggtagaagatgagaatccagcagtagtcttggttcaccatttggagctcggtgccgtcaggtgccagatccttcctcgcggcttgaagacggatgtaggcgcgaatcttgttgatcacggttggaattcctcccaattgtgcttcccgtggatttttcgcaatggcggtttccacttcgtcgaagaatgtgctctcaaggaaacctctcgaaccttcaaggatctgtttcttgagttctactgctttgagagatttggacgattcttctagataatcttcggcatactgtcgctccttcactgctccgggctccgatggattcatgatgtttggcttctcgtgaacaattcttatcaaggcttgatatgcgttgaagagttgccgaggtacctagaaaatgattagctgggacaaagatacaggttgcgcgaaattttgaaacttacatcaccaccagcttgcacttcaacatatgagaattcgtcgagtatgggatagcattttccctgaagtctggcgaggttcaactgttgaaccttctcggcgtagtggcccatcttctcacgttggaacctgagatcaggcgagtgagccgcagttccctcctttcgctcagctggatcctcaaatatttgacggcttgccaagccgaccccaggtgtgccaatcaccgacttctcaagaccggaacgtccgaatacgcttctgcgggatgccgttggaggtccgttggctgaagcagctccggtttgcttagactgccgtgttgaacgcccaaaggcacccttggtggtagatttaagtcctccagcgccggcagcatccttctgggatagcccgaaatgatggaatattttttgacgttggtcttcccagtccatgtccaccttctcctctaggaaagcatcgaagtcccgctgagctctggtgagaccctctgcgatcatgacttgtcgaccacgttgctggatattccgcaaaaatctttggttgtctgggtcaaagtggtccatttccctcgctggagctgctagagatgcctgggggtccagggacttgaggtcgcgcaatgcttgtcccggggatacgccggaagctgcgagaagataatgactattgatggtgccgcaaggttagtcaaggtcaataagaaaacatgcgacaagatggaactcacgctttgctgttcttgccgtttggggtatccttttgtcctgtagagcctagctctcgcgccttccttcgaatgtcatccaggcctaactggagactaggcacgtcttcgaagttgttgttttgaaagaccgatgacaatggtcgcttttttccacgttctaataggctgttgaagaacgcaggttgtgttgactgattcgcaggttgtccctgggtctgcaagttgctagcttgttgtgtctggcccaaggtcggggcttgagcgggatgttgctgggcctgagatccgaacagagacgacgtttgcgcgccttgcgcacctggagcagaaaattttgcgaaaggacctgccgtctgattgtttgcgccaaacaggctgtttgactgtggggttgtcgaggctccaagaccccccccgaagagagagccagtgttgaaagccatggagggctggtaggtgagaaagctttgagaaagaagatctaaactaagattgcagaaaaactattctttgaattagttcactttgagctgacaattgagctgacaattgagcaaaatgatgctgatcaaagggcaagaaaactgcatacctagggcttcgtaacagtaaagaattaccacgataagtagtggattttctcggacttctgatagtaaggaacagagcttcagcagagctctgcttttatatggataaaaaatagccccgcaattaagagtcaatagattgtcaataggcaattgaagaggctgtttaggaagctcggtctaaacaattgtatcccggatcatcgattgaccgattgaccgaaatcctattgttcctttatttctcaatgaccggaaccattgaacccattgaacccaataaaactcccattcagtcctccactcgataatagtgatccatagattgattcggaaatatgcctgtgttccaatccaaaacctttcgtcgggcagctacggaatcatcgtccctcggcgaacggctcggtgcgttctaccgggcgcgactggctcgacaccctttcattctcttcggacttccattcatggccgttattgtagccgggtcatttgccttgacgcctgctgctgccctacggtacgagcggtatgaccgcaaagtcaagcagctcagtcaagacgaagcatttgatctcggacttaagggtcctgacggggaagagggaatcaaacgcaacccacggaggaggattataggcgacgaaaaggaagaatactacgtatgtattgttttattgtttaattaatcctgactttcttgtctgacatttggactgaatgctgattattgtatacgcttacagagactcatggccaaagatctcgatcaatgggagcagaagcgagtacagcgattcaaaggtgaaccggatggaaggctgtaacactttgaatttaaatatccgagtgcatcctcgaaggcgcggaaaacacgttttcctcgtgacctcacctggcgcatgagctcaagcctcatcgctaggtgtacgttgccgtacattgctgtgtggagatgaaggaggagctcagggggtgcagccactcgattatctggctggccttcgcgtacgacgtatgctatgctccaatatccctacttaggtagccattggaattggtctcgctcactttctcagcctctcggaagttgtatacaacatacaatgtctatgcttcctggatcctatatactaggccattgactgtggaattcggggaaatatatatttccgcccctctccagtctgttgcctcaccttttctgtatggaggtgaaacctgcatgggtgggaccactccacggttggttggtcccttggagccttgcaactaaccgggaactgggatgaggtcattgttaatattgattcaacataattcagtttatgaatacaccgatatacaaagtatatattgatctataatgaaaggagacttactcggccagatatagctactaccgggctcccaattatctctgtagtgtgagctacctctatatatatctatgtatacagcaatcactatttaactattcgtttatcgggaatatatgtactatatatagtgaaataaaagcgacctacaaaaaaaaacatacaactacgtcaggactgaaggtgaacccgtgatcccccacacaataacgtcataacttttcttctcgaagcccccaaatttcttcttcacccatttcctctcaactcagggctagttccaggcgattattaatcatgcaataacacagattctctctctgatatcagacctgttcatcccccactatttggcatttttcgttccattggccaccgattttcttctttggctggaccctggtctattcgcttcttattgcccctctttgtctctcgctacgtcagttgcgtatatcgtgaggttcttccatctgaagttttgcgtacgcttcccttcactttctatttgaggaacaacatcggtttcaactttgtgtattggatgccatttatgaccagcgattctcttcgttcctaggtcttcaaaggccctgatatcttggtccgagagcttgggagcacttgtcagtctcacccttgagcagccgcttgcaattttctgatacgcaactacgggtgtcattgtcagagagttttgagctgactgtgtttcctcggaccagaaactggagtcgtggaagctaagctgcctgccatgacaggccctggacgctcaccctcctcgccatgggtacaaagtgcacaaggtggtcatcatgatggtggtgtcgcacagtctatccagtctaccatgtccccaccaaccacgggcatgatgtcgagcacggcttttacagaaaaatcaagtcctaactattttggtatggctgtgcaaaaccccaacaatcaacagacttccaacccagggctgtccatgcaaaataactggggcacattaccccatacgcaacctctgccgagtccgcaattaccagtgttttctcaagaatcagtatcagcgggattgaagaatctattgaagaccgagcctgaaactagccgcatacgccgagaatcagcattgcatggatcttcttctccccagacgacttcgtggtcaaagtcctcatcttcacatccgttgggaaatttctcattcgcacaacccagtgaactgaggcttccagccggcaaaaacttagcgcctactccacaaggtatgaaaagtcttagatttgcttttggttttttttttttgtttgtttttggccctataacttcctgatgtgttccactgcctatcttttacaaattatacaagacctaacactgcttgtttaggattcactcccgcttcatttccttgggtatcagccgaacgctgcgccgaacgtcttgaatcatctcagtcaaatactatgttatttgatgttcgcccatttgctcacttcagacaggccaatatcaaaggatcactcaatttatgcattcccactaccctactcaagcgtcgatcatttgatacccagaaattagagggaactttcacagacgacgccgataaacagaatttcgctcgttggagaaagtgtgacgtgatcattatctacgattctgccgcagcggagttgaaggacgcagcacctcttctgaaccttctcaataaatttcaggctgaaggctggaaaggagatgggttgatcttacaaaacgggtttcgaggtttctcgggtcggtttccacatttgattcagcagccacagacacagacgactggatcatcctctaaacgcccctctcccatgagaatcaacctgcaatctgttgctcctgtcgtgggtggttgcgccctaccagaatcatcctctgccgtcaatccattctttggaaatattcgacagaacatggacctccttggaggtgtcggacaaattcctctgaagcagcccgatcaattgaccgaagcaaagcgacagcaactcccttcctggttgcggggcgcttccgatactaaggaccaagggcacattgtttcgaacaaattcttggttttggagaaaacggaactggaacgcatgaaacaggctttaacatatgaaggaccttcaggtgacaccaatggtagccccaagaaatatcgcgtcgcgggaatagagaaaggcacgaagaatcgttacaatgatatttacccatttgatcattctcgtgtccggctcgagggaattccagctggtgcctgtgattatgtgaatgcgaaccatatttctgctgaacttaccaatcggaaatatatcgccactcaggctcccgttcctgatacatttgatgtgagtagcagttcctcacaatgcttgttatcatattgctcacaatatccaggacttttggcgcgtggtgtgggagcaagatgttagagttctcgtttccctcactgcagaggttgagcgaggacaggtgaaatgccatcgatactgggagtctggaaaatatggaccatttgaggtaaaggcctattcggaaaaacatatctacatcgaacccagagttggcagtcccatgccgtcgaccgaacggcctgatggcacaaacgaaaatccagtgatcaccgtgcgaaacttcagtatctgccatacgtcattcccttttgagccgcttcgagatatcacccagctccaatatccttattggcccgatttcggaacaacgtcacagcctacccatcttctccgcctcattgagcaatgtaacaaggtcattcgtgccactagcaaccccagctttagtagtgagcaagcggaaccaaagggtcagcggccggtactagtgcattgcagtgcggggtgcgggcgtacggggaccttttgtactgtcgatagtgtcttggacatgttgaaacgacaacgtgcgcaggctgctggtggtggaggcctggatcaaaatcctagcggatcttccgagtggatgggggatttcactcttgacctaattgcaaagacggttgaggatttccggagacaaagaccgagcatggtgcaaaacctgagtcaatatgcactctgctatgaaagcgtgcttgaatggctcgcttctgagatggactagaacaagtccttggacttttcttcttcttcttcttcttcttcttcttcttcttcttcttcttcttcttttctcttgctatgatgacgaccctgggatacccctttctggccttgcattattaccagggccatggttttcttttgatctatgtacaatgtcatacagctagtggttctgcattttctggtgtttgggattgctttgggacaggggggaaaatggacacagctaattttcttgggtcttattgcgcataagagacaatggtagcgtcctagtctgatgatattcaagaattgcgctatttcggttacaatccactgctttgaagagggcttataaccacagttcaacagcctgactttcatatcctgggcaacagaagtttatcaagctctttgtcggagttgtttatgtactattgtaatgcccctagcgtttgacgggccgcttgccttttccactataaccgatattcaggaacatcactccgcgatcagtaatcgcaaccagctcgtcctcattttcagtgaaccgcaattgagagcaaacggcctctaaatgaaggacaactggtcgcaagtcgatggcacctgtagacgattcccacgatgatggataaaagccggtgctgttctcttcaatcaattccgacggattcaatgcccagacatagagggttttccagttagcgacagcaacacgagttccgcgacgcgaagttgctaccggagatccatgcgaagttgttacttcccggaatcccccaagctgcgccacaatctgccaattttcaaagcgccttccgcggtcaagattcaaaacatgggtacaccgcggaccagtgtatgattcagacttgagtagacatgccgcagtccatttttcaacgcggtgggtggcaatgccgaaggcaaggtactgccaatgacagtgttccccccggtttatatcgccgagctcatgagtaccgaagaatggtattccaattgagaattgaagcgagagggaagacgaaaactgcacggtgcatgcattcttactaacatgcggctttggctcgcctggggggtcagggatgcgatcaagtctctgaaaggcaccgtatatgttttgagctcggtagtggtagagcaactgaaagcctcgatcattgaaagccaatttcattacgggccctagtccccgcgaagaacggacatgtgggtcttgatcgttggagcttgtcagaacgtaagcctcaaaaccagcatctagagatgtcagaaaccagttctaatatgacagaatgacgaaacgaacaagtgattttacagggattgtctcccttacttccttctgtgatgccttcgctagaatcgtcttcatcttcgtcgtcatcgtcatcgtcatcgtcgtagatttcggtataaagaaccacgtcatgatcaaaggggtcgagcgtgttttgccatgatattgcaaatttgtcgttggagacggacaaagccagtggcttataatctcggcattcgggaaagtcatacaatcgaatggtgtttgccctggaattcaagcgatggttggccaggtgaatactcccgttggggcaagacttgagggcgtgtttaacaaatgggtggtctgtatccagctcttggtctaagaatggtctgaatcggtgaaggacgtagactccaccgttttcaccaaaggcagtctggaggatttcaacctccccaagatcctgtcctggggatttcaatttgacttcggtccgatccccatcgctcatgtcaatcagatggacggtgctatgccctttgaagacaagtagtactcgaatgctgtcttctgatgcctcaattgtcgatgcatggtagtcaatcactcgattttgatactcataggtggggttggcgtaatgctctgccccatctaactgttcatacgagcgcctcattaactcatcaaacagatgcctagtctgataagcttcaatcccatcgttccaaccaggagtattatgcagctgatgaatgatgacttctcggctgctggaagcaatctcataaagcctgcggcttgaaaaggctgcctggaagtaggctggtgtgttgcagctccgaagaaccagttgtaccaactctgtgggaagttggagcagcatatttgaggtataatattgccctaggtctaacatgagggtttagcatatacttatagagcttctgtcaaggcacggtgcacagactttttgttgcctcgtgggtctaggtagcagcgccaggtatggaacaggcagaaggggagaaaatgatgaaatgaggaaagacaggaaagataaagacagaaacccttggaagacaaaaaggtcgagaattcaaggtatcactagcggtttcagctgtttacccgtcatacttctgaaatatgatattttgtcttttctctccgccttgtatatatatactagtacacaggccccctgcaggtccaactacggggtgtaatatacaagaatacacgaatctttatgattggcttaagatttcagccgaaactggccttcgcaagacatgtagccagataagtctatgacttggatggacttctagttgaaattgtgtcttcgcaaatagcaggctggcctgttcaaaagaataacggcccacaaagcatagttccatccagttattatttcaatataggtaatatgatgaaagaccgaagctcactgtccttctccgccaccgcccgcggacatgctgaggaacatgaggattggaataacccaccagtacctagtttattgattagcgcacgaaagcaacgatagaagtatctgtaacctacttctgcaaaatagacttttcttcaggttgctctgggttttggccatcgggcccaacaatcactggcctgttcaggtgaggctgcgtcccggattcgttcgagacaagttcaatttgaggactcgatgttgagccctgagcgctagtagatgcagacagggagacagtgtagacttcgttggttgggccgagatgaagacgaaacgttggttgctcactggccgttaaagaggacaacgacacgagactgccaacccattgctttttgtttggggaggttgaagtgtagagaccaacacgcacgagattatcgcgctggtcatcttttggggggtgatatgagaccacgtccgatttcaatgaggttgggtcgtaggagatgctcgcgaggacggacggttgtggcgactctaagggccaatacaggatgtcggtcgagaaggaggcattggcgacagaaattaggagtaacacagcgctaaagatggtggataggaacctcatggcgaagaagtgaattatagtgaggagacaacctgagatgtcaacggtttggagaagaaagtccgagctccaaccccacgagtacataagctgtacataagctgtacataactatacatgactatacataactagtcatacagatgaatcccttacgatccttgctatatacatattcgaaattcaaagactaataaaatatatatatacgatatgtatacacgtaaatgttcttgtaaaaacataacataaaataggtaaatatcataattttacacttacctacttatatggtacatgaagagtacatcaatcaccgtataaaatagcgggacattcaagtattggtagagtgccccgaaagtgcaggtaccggctagtactgttccgtcagggcggcaaattaatgtggtcgtaagttcttctcctcacagttcaccttcaattctcttaattcaatatccacagatataaacagtaagtctgcttcgaccagtctatattccgtgttttgcgactcgctaatccatggttagtagcaatctatagctccatagctgtcaactcgaaagggaagagctactacggtaacatggcctcgcggaaggcatccaatgaccctcgggaggatctggcagttcatgtcgaccactatattggcattgatgtcggaactggcagtgcccgtgcctgtatcatcgacgacaaaggtgatattgtggggttggcctcagagaatatcggtctttggcaaccagagcacggtttctatgtgagtgcaactccaaggaatttgagtgccaaatcagtcttacctagcctctaggaacaatctacctccgatatctggcgttgcatttgtgtcgctgttcagcgcgttattagccagcacaatatcaatcctgacacggttcggggtatcgggtttgacgctacctgctccttgtcggttttctccaatgataccgacgagccgatctctgtaacgggccccaatttcgactcggaccgcaacgtgatcttgtggctggatcatcgcccagttgaggaagccgcgaagatcaatgctaccaaccacaacctactccgctatgtgggcggaaagatgtctattgaaatggagattcccaaggttctttggctcaaaaaccacatgcctaaggagctctttggcagatgcaagttctatgatctgggagatgctcttacacacattgctacgggcaatgagaagcgaagcttctgcagcgtagtctgcaagcagggatacgtgcctgttggtgtcgatgggagtgtcaagggatggcaagaagatttcttgcagcacattggcctgggtgacttgaccgaagataatttcaagcgtatgggcggagttgacggggtggtgagcctttccctaaatgacgatggcgcagtttactgacttttggtgccacacagaatggtgattatttaagtgccggtgaattggttggcactctctgcgatagggctgcagccgaattaggcctgccggctggtattgccattggcagtagtgtgatcgacgcctacgctggctggatcggtaccgtcggatccaaattcgacatgcacccaggccaatctagcgcagatgtccctaaacttgatatatcggaggccttctctcgcctcgcagctgtcgcgggaacctcaacatgtcaccttgccatgtcaccagacccggtttttgttgatggtgtctggggaccatatcgggataccattcttcccggatactggatggctgagggtggccaatctgccacaggagaattgctcaagcatgtaattgagactcacccggcattcaaccaggctatttcgattgccgagtcatcccatgccaacatctacgactacctggataagcatctcaaggagatggcacaagcccgaggagccccatgtgtatcctatctcggacgccacttcttcttctatggtgcgtctgtcttcattgttagcattgtttaggttctggctgatttcgttgatgaattggggtttaggtgacctatggggaaacagatctccccttggcgatcctaacatgactggatccgtctttggcctaaccagtgataaatctgtggatggccttgccatttactactacgccaccatggagttcattgcgctgcaaactaagcagattgtagaaacaatgaacaaggcaggtcaccacatcacctctgtgttcatgtcgggctcacaatgccagaatgacatcctggtcaacctcatcgcatctgcctgcgatatgcctgtgctgattcccgagtacatccatgctgcggtatgccacggcgctgctatgctcggcgccaaggccgccagcgctgattcccagggcagaacccttgatctgtgggatatcatgaatcggatgagtaagcgttgcaagcaggtgttgccgacagaggataagaacgagaaagccttgctcggcgtgaagtatgaggtctttctagaacagtgctggaaacaacgaaaataccgtgggatggtggatgacgccgtgggggcctggaagtccaagtccacctaatttgatatcacgatcacgtcggttactctcttttcaatcacaaaaacgagaagatatggatactggagtgttagttcacgatttacaaatcgggtatacttgacatcagtcattaccgcatactaaaaagtatgacaatttcgaaatcataacataattattgcaaaatcatgcccaatgcatcgagctacagagcctatgtcatgaggaaagtcaagaacatgagtcacacactccatataaacgtcaagcatataaacaaaatcccgaaaaaacattaattcagacaagccaatgaatgccttgtgctgaaaagcaactatcactatgcaatatgtgcactttgtctagtaggccaccccgcctcttgttcggccaacagtgtagaacttgttggaactactggtgctgcctatggctagggtatcaaagcgatccacgcccatactgtccatattcacatagcctgacatatggaagccaagcacaacgacgaggtaggtgagtacaaggatggatcccttaaagtagttgctctttccttcgccgtatacatgcgagagaaggaagacgcacataataacggtaatcatatcccactgcgggaatattaggctgttgaaatattttgttagccacagcatttcgattggagacataatgaaaaaaaaaaaagaaaagaaaacgaaaaagctatcttacttgaatgagtggctgacaagctcagatgggtctagcgagcggccatagaaagcgctgaagaataccacagcaggaatctgcaatagacagacctgtagtgcataggcagacccaatttccatagataatgcaatgtttccgttcatggcaaatgagatggcgttctgttaggtgtgttagctaagaatatcaaatgcaaaatcacctcagatagggccttcaatgaccaacgtactaggaactccgtcgtatttggcaccaacgcgaaaagagtaatgccgaggaatttctcatcaatatccacgctctctagcacaacatcaaccgtgttgacaagaatttcagcaatcactgcatagaggacagttgccccaagaagaatgacagagcttttaactttgctccaattaggtgcatcatgtcctccgctagaatgagtgggctccacactcaacccgagatcttcaagctcttccccaggtgtatttcgtgatcgctccggagcagggcggctagattgacgaacagaggcttgatggtgttgtacattgggcttgcgacttcgagccgtatcccgagcagccactgttgctgctgttgctgctacttcggtgaactggcgtactagacgctcgttgtcttcttgggccatattacggacaaactttggcacagggtaaccgtcctcgccgctaggattggggggcaccaagtgtgggaaattgcccctgaggtctgcggcttcacttccagccccttcccaattgccagagtcattgtcctccaagccaagatgcttcaatgactggcctaagattcgcttatacagctgagattcacggatcgaatctttggacccagaagcggcaccagaagcttcgggctggccatttgggaacatgtgccgtggctcgtagaatgattcttgggcagattgggtggcatgggcatgggcatggggatgggaattctttttttcttccatctctgatgcccagataagagcagcgtgggtcctaagagtaaaccataggccgatgccgtatgaaaggaacaagaaaacagcggcgatccatgcatatggctgtaccgctttttgaaagaattgatcatcgacagccgctgtttgtgagaaatagcagcgcctgcaatctcgagtctctggatcgagggaacttacacacgagtggcagttcagctcatgctatgcaccagtcaacttaggttcgtttgcaaaggaaggtgaaacttacactaccataaacctgatagaagagggtgggaccaaaggcagcaataaccgcaaacaacaacatcgtcgaggtcacaccagctgatttcacattgaaccgttgggtcttgcgtttgagtgcaccaaagcacatggacaaaccagggaggaataaaatgccgacaaagatactgccgatgatacttccctcgacaagctgagccttgccctcagtcaaagcgacacagtagagatatacttctacgatagttgagaagaaagcattgatggcagcacctaagcccatagaagattgagcggagatcgaggcgacggcttgtccaatgaaataggccagaggaataatggagagcaacgcgagagggaagatcaaggccggatgtgtgagccaattctgcaagcctaagaatttgcccaaaacatggtagtcgaaaatcacaaacacaaccacgccaagaagattgatcaaaaagatgttcgttccatcgagagtgtacttccagtacctcgttccagcagctctgtaggtacaaagaagtatggaagacgaagatgtggttgtgctcgatctagcatatctggaatcggaatggaaggacagtgctagcggatgtctgcgcaaatggctcacgagtgtaatcgttatacgacccatgggaatccaaaacaccaagagccagcagacgagcgataccataagcatcagcggaccaactaggaagtagaagaacacgaagaacacgacgcgacccaaggtccattcgccccgcccaaagaggcgacgcttggattgagcgagctgagaggactcttcgcgttgtccacgctggggtcgcccgagcaggctgtcttgttcaccggctgaatcgacgctgtttcttcgtctaccgaccagggaccgatctctgcgagggccgaagaaaagacggccatgttccaggtcgccattctgccattgttcatattcgctgatactgcgtccctcgccttcatcttcctcggcataactctcctcggtctccagaagaacatatgatccgaacgggtataacagatatcgtgaaagacctgcaaatactcttccgtatgccacagcactggatgagtaggaaaaaaaaaagcaagcaactgcggctaacagagcgaaaagggcaagccaccatccaaaaaacaaagaccatagtagattggtcaaaaaaagcatgggactgacatagcctcctggagaagagtggatatcaccctcggccgttttctctacagaacggcttttcttgtacaacgcaggcttccagagtctgataccaaacgggtgtgtttggttgatggcctgttgacggtctttgagtgtgaagctctcagcatcgctggctgcgtcttcatcgtcttctattccaccctcctcctcaccgtcctcactctcccctccactggtatgtccggtttgtttcaacgaaggaaactcttcttcataatccagacctgcttcaggtaaggccgtttcgtctgcgttgtaaccctccgaatcggctcttgccaagggtctgggacgagcactgggacgtcgtctcaaggtcgagctttgcgttcgtagtgggcgaatcctgggtgattgttgcgggttcgcgccttgcttcatcgtcatatattgcttgacctcattgacatcatcatctgtcgagaacccttgccctctgtgggggattggacgtttggaagacatgcgacgcgataccgagggctttcggggcttatcagggacagtagaagattgagtcgtgaatgcgcgagtcaaactctcgtcttggccatcatcatttagttcaggattggtcgcctcggaggaggatggatcgagtgtacctgcaattttggatcaacccaagccgtcattgttgtaggttacaccaaaggcaagcttaccgtatgttctccgcgcggaggcagaggatctgattggaggcacagcttcagaagttggtgtttccattcccgccatcgcagatggctgcgtggactcgggagagccagggtttcctttatcgccagccatgacccagtgatttgacaagcacacagtgaaccttggaggcacaagaaacgagtaagagagataaattcaaaaagacacggggtctcttctctcttttatgctgtctttgttatccccagagaaagagacagaaaaaagtcaaagcgataagaccggagttcccagtgacattattgaaccaaagagatctaggtgaaacgcagaaatcgagaatgtcaatgaaagcttcattagagatgcatataagtcattgcagtatcagggaggacgaaactcgtggaaaagagtatgccgaaggggagaaatggctctttgaccgttgccttctcttgcagatgacccggtcatcagcccacctaagcagctccaaggcttgaccgcccaataagatccacagctgactcattgggcggggagctcccgaagtctcatccatggaaacaaagcaggatgtttgactggtttgtcttaaataattagcctgatatttcaggattgaattcctttttgttaactagttaacttaactaactaatctcttagtcagcacaactgaacgggcactgggcctgagcttcgcgtacagctggactgctctgctcgccaaaccccagcttcaacttatccgtttctgtttccgagctacatcccctcctctgacgaattctcaatacaccatcgtctgagcagaaagataaaggcttttttttcttcactgcaactgtgttctgtggaagacagacagcccttgactctccatagcgtcatcatcccattcgccatcatggctttagacaactactatcgcaacaaaatcgagggcatgaagcttgagattatccaaggccaggctgttctacgacgattagaagcgcagcgcaatgactacaactcgagagtccgtctactgcgcgaagagcttggcttgttgcaacaacccggctcttacgttggcgaggtggtgaaggtgatgagcaccaagaaggtcttggtgaaggtacacccagaaggaaaatacggtaggcttcgtccattctatcttggctttcaatgaccgggcttatgctaacggtatggttttctttcatcgcagtggtggatatctccgatggtgtggacattagcaaactcgttgtgggcaagcgggttgctctactgtctgactcgtacaagctggagaagatgttgccgtcctcggtcgatcctctggttgcgctcatgatggtcgagaaggtccccgacagcacttacgacatgattggtggcctagaccagcaaatcaaggaaatcaaagaagtgatcgagcttggcctcaagcaccccgagctcttcgaatccctgggtatcgcacagccgaagggtgtcttgctctacggcccacctggaaccggcaagaccctgcttgctcgagcagccgctcaccataccgactgtcgattcatccgagtgagtggttcagaactggtgcagaaatacatcggagagggtagtcggatggtacgtgagcttttcgtcatggcacgagagcacgcaccaagtatcatctttatggatgagattgacagtattggatcaagtcggatagattcatcaggaggcggtgactcggaagtgcaacgtaccatgttggagttgttgaatcagttggacggcttcgagccaacgaagaacattaagattatcatggcgacaaatcgactggatattctcgacccggccctacttcggcctgggcgaattgatcgaaagatcgagttcccccctccatcgtcagtctttccctcccctcgcccctactccgccccagttatttatggcttgttctttttttttttttctctttttcattcctttggccttgagcacgatgctaacttaactcttctttagggtcgaagcccgtgccgacatcttgcgaattcactctcggtcgatgaacctgacccgtggaatcaacctggccaagattgccgaaaagatgaacgggtgctctggagccgagctcaagggtgtctgcacagaggcaggcatgtatgcactccgcgaacgtcgggttcatgtcacacaagaggacttcgacttggccactgccaagattctgaacaagcacgatgacaaggaggtggccgtgtcgaagctgtggaaatagaggcctctccaaagcggggggtggatcccgggggcctgggaaacgatcgacgacattgtatcactagttctaatcctaccctgataattcagaccccaagtgaatccatagttgtgcgacatgtctggatccgacctatttcgggtgatgtgtaaaggtgtaactatcccttggcaaccttttcgggggcgactgcctgcttggcctcggtgcataccctccgtccacatacatgtagtagaacagccatctatctcgtactggatatggggtcggtctgatgtgcaaggagaccccggaagtagatctacgtaacgttgattggttattttcccgactggcgaaggaaaaggaggcttggcagcttcagtctatctaaaatggcacctgaaggcagtggcttactttgtaccagtacggagatgtggtacaccatgcctccttgagtgaaggcttggcatattgctgcggaccgtgtagatcagagatatctcaattggccttggcgcggtattcagggatctctgactattgtcttggcagtttaaaccccatcttcggtatatgtgggaatgtccacaccgagcgtagtagtatacatcgggtaatatcgactattaaaatcattggacgcatttctccccttgccggtttagactgacgcggaattgcgcgtgaccaaccggcggatcaacgcctgggctagcgccaaggtattttccaacctgggaaggttggactgctgaggtaaccccccttgtcctagataccggatccacttaggttcaccccatactttgatgaagtatccaggactacttcttgtgaacccgcccttgcgcagccaagacatgattgtaggttagaatagtctgaatagagagaatcctggagtgagattgtacccttggatgttttatatacatgaataactctgtatttctgaatttggttctgacaaagtcattgaccgagagtccgtttacggtttggttcgggcgttatctctttactcaattgaattagaatataaatcttgcaactaaccagaactggttagtccactaactaagataggtcaattatatattaatatttccaaaaaaagcaatcttcctcctctccacgtctccacatctccacaactccattggctctatacttctccgtactcttatgtactttgtacttggtatttctttggtttttcggtttttcttttccctttttcaatatttgactcaggaatgatcagacaactccacgattgtatttatccgaatccccggttcatttaaactatttccattccccccttcttccccaccttttctatactttcctaagcttgactttgaaatttccattcgcctagcactataattcaaccggactatgtccgatctgtggtattctatagcctttgccattgaccctaagagaacggaagccatgcctgccgtcttacagtcaacaatcaatttgctggaaagtgagctggtcaaagcccgcgctgccctccgggatatccaacccaatgcttcaccctttggattccggagtgatgaagtcgcggtaggcgccatgactgcctacagacgggatctcatcggccgcgcccccgatttttacggatctcgccgcttgacgctgaaggaactcggcctggagcccgtcgtacgcgaactacccaccgaacgagtggtaccaagggtgcaatgtataacacccgcaccgcctcatcgaacaggactagaggatgtcctgagcaatagcttaatcctcgaccacatggcaccatatctatcagtgtcctcgttgatgacgctgtgctcaacttcgcgccgcctacacaccatgatcactcagacaccatatgtattccggcatctcgatctgtcccactgtcggggcgcagaactctctacagtaacacaagcggagaacgactctcagacggaggacgagatctactccgctccagtgaagaatatctttacgagccttgagcgcagaggtatactgcaagatgtgcgcactctcatcttggacggggtgtcagtgccggctgacctggtggccgatatcattctgacggatcgctttaacgtcaacatcctgtctatccgcgaatgtcgccatctcaacgaacgcaagctcatgcaggtccttcagcatgccgttcggcctacacgtcctgccggtatgccacgagtgaagggaatctaccatttttctcccatgcatacgggacctcgggcagtgacacgaccccgataccgtaactcgtggggaacccgtgtgggaactttgcggacatccagccaaatcccatctaactccgatcaggaggatgaggtctccgcagaatcctcgatagagcagcaacacgagtggtatagcgcatcggggaagctattcaagcacactcctgaggaaggctgggcccaagtacttaaaaaatgtgagggcatcattgcctttgatgctgctctttgtcgtggcccgagacacgatctcaatctatacagttcgaccacggaggcgggcaccccagctgcggttccattgctcggacccgccgtggccaccgtagccctcggaccccgtgggtgtgacggatgccacagttcccccgaaggtccgtctatttggagccagtccccagatattcaatttccattgcttggccccccgccattgcattcatctagcgttgccatggcgaaacggcccgagctaattccaggagagcatccggttctcattgcccgctgcacagactgcctcaccaactgttggtgccaccggtgcaataaatggttctgtgaaaactgtctaccaaacccgcagcgcgttcgagtaagcctatccccgcatcagactgcagtccacgccagtgccgctgagctgcaagaacgtgaggtgtgttgatattgaatcttccctgctaatcgtccatatcactgattcttgtcatgcagagattggaacgaggtgtaagcaaagactgctgggaatgtggcccaactgtgagtaactccccggatctaggatgtcacttttttttctgaccatagtagtgtgcttcctgtaagctggaatgccagcacacgtgccaaggctgccagggcgattattgcattcagcacaatgaaggatgctcgaagacactggtacgtagtaaccgaaggccctataattgcatgagagcgtatactaaccttgtcccagtgtgactggtgcaataccagtgctcgcggtcgaatgcgtggcgacttctactaaatttaatttcgtgattttaaatatattggtaatcgacacgtcgaattatcgcgtatgtacggagtacgttgacctgattttcaagcgaactatgaagcgtggaggcttccagaattgaaactcttatctcttatcggctgtgcagaccgcaatagtgacagattttggcagaacttggcttttctcgggcagaattgtagatatatatatatatatacttgaggttgaagataaatacaaagccttgaaacccgtgatttgtatgattcattaagaaaacatacagaagagaggtaatatctatctctatacagtaggcggagagaaaagcggtggtcctaaagtattagaattgacttttgccaccttcgccgctattgcggtccgtttccgccgcattggaatattcatataaaggatgcatcccctctctaatgattgtcaaattctatcatggcccaagatactctagcctggtcatcccagcttttcgtcgcacctccagagcgggcgcctcggctaactggcgacaaaatcactctaccgcaatctgcgcttgaacagctactagctgccgctccgctccaagctgtcccctcagggaattctcgtgtacttacttcgtcatttgaccctttcaatcaccataccctcgccgtcgaatcgcgcgcccgtcaagcggccgagcaacatcagcagcaactcccccacccgttaatcttccgcattgtcaatcctctgaatggccggttcatctatgcgggcattcgggagttctccgcagaagagaatgaagtcgtactgagtacattgctcagagacgcacttgatatcaaggatgaagagtccttgagcgaaaatggcggatcacaagacctagcggtgcaaatagaaagggaaccctcaccacggactggccccgcggtcacagtacacgcgaagcaactacccaagggcacctatgttcgcctccgtccgctagaggctggatatgatccagaagactggaaggctcttctggaaagatacttacgggataactttacaactctcacgacgggcgaacttctgacggtgccgggtacccggagcgagtcattcagatttttggtggataaagtgtttcccgaaggcgaaggaatatgcgtggtggacacggatcttgaagttgacatcgtcgcattgtcagaggaacaggcccgagaaacactacagaagagattggaaaagtcctcacgcgcgccaggcacaactagtggcagttcgatcggcggtatcctcagcattggggaagatgtcactgcccaagtattgcctggggaatatgtggattatgagcttcgagattggaatcgccaggatactatccagattgagcttactacggacaacccggaattgagtcttttcgctagtcccttttctactcgccaaagaagccgtcctagatcagatatgcatgtcttgggggacttctcgacccagtcgcccaagaaattcgatctccggcctacgaacatggttctagaagacgccgaggctctctatatagcagtccacgctgatcctgcggatcagagtgaatcatctgatccacagcggcagtcaccgtcgcaatatcacctgcggatcagagtgaatccttttgattctttggtcagtcataatgggacggaagagtcccacgagcctggcgatgtgcagtgcaagaactgccagcaatgggttcctggacggacactacttctccacgagaacttctgtctccgcaataacatattatgcccgcagtgccagaacgtctttcaaaagcgatctttagagtggcaaggccactggcactgtccacacgactctggttatggcaatgatgccccaagcaaagaaaaacatgacgctatcttccaccaaacacacaaatgcatcgactgtgctggggatttcgagggacttcctagtcttgcgcaacatcgtactacagattgtcctgggaagttgattctttgtcaattctgccatcttctcgtgccacagaaagccgattctgaccctgatttacacgaccccgaggtgatgctctccggccttactccacacgaactggtggatggaggacgcaccaccgagtgccacctgtgtaataagattatccgattacgtgacatgaacacccatcttcgccaccatgacttggagcgcctttctcgacccgcaccgcgcatgtgcatgaacaaaaactgcggcaggacattgaataaagccggaaatgagtctgttgggctgtgcaatttctgtttcggaccgctgtatgtggatacgcacgacccagagggcaaagcattacgtcgtcgcattgaacgccgatatctctcccaaatgatgaccggatgtggcaagccctggtgtcaaaatgagtattgcaaaacggcaaagcagaaagcggcatctgactctggtcctccagccgcgatgagtgtggtggaaattatgaagttgacacgcccacttgtcgaagctctcaacacccagccggatgtgcctaacatgtcgcttttgtacctctgtgctgatgaaacaagtcaacaccgtcgcaatcttgcagaattgattgcagcagagagcgttgaagggaatgacaaagtctatgatctaccatggtgtattgcagcagccgaagccgcgggtggcgacttggaaaaggcgagagagtggctgtctaagtgggcaccaaatcagggcgcaacgagtacatgatccgtctagttgttgatttagacttgattgggtatgagaatatgggcttggttgatcaagttgagcagatacaaggatttaataatgcataatgaatgatatataaacacagctagaattccataatattcatgattaaaatgcaaaggctggtctagaattgagatcatagacatcgcagccactagcctaaaggaccatacatgcaacgcatagacagagaacatgtatcaatcgaaacccaaccctttcaagctgcacctgtcttcgcggcgagcgagccggtgccgcgcgaagagaagatacccataattccaaaaacgacatagaacagagccaatggatacgccacgagacccctcatgccactcatacgcgccacagcgcaaaacattcccgatgaactgtatgtacaccagccaacagcggcaacggtcaggagatagccgaacatggtatccatgggaatcatgatgccaatgagactggtaagcaccaaaggaaggaagcagtagcccaacacgctagcggagcgcgggaaggtcagagtagcagagaaatggcccgcggccgaggcaccagacatggagggtttgtggtggggattgtagttggtagggtcggcggcgtttggagttggagcggtgtcgagagcgggagacatgaggctgaggatcagatgcaaagcgacggtaccgaaaacggcgacgccgtagatatagccgtagaataccttgcctgagaggaggaggaaagtgccgtacaagacgatgtagagcagagctccgtagagatcgctatcatccataaggtgattatcgatagaggcgaagggattcagaacagtcagtgtctagacaatgaaaccgttagcacccaatatcgggcattcacattgaccagaactacaattaaattaaacccggggtaaaaaaacaagccacccgcaagaccgggaccccgcgtctcctgaaagcgcctgatataagaatcaaccaagactaaccttggtccggatatgttcaaagttgacacccaactcctcaagcaacggcggttcaccatcatacccctccgtcccaaatgcagctaaccagcccgtccttaagccgccctgttcgcccatccgtccactaacgccagcggctgcggacccgaatcccccatacccactaccggcagggtaagcttgtgtggagggattgggagctccaccaaagccggcaccatatgatgcttgtgatggggttgtgtgaccggaaaccgaggagtaggacgaggggaagaactggagattctgtggtgcggagccctgaggggcgtagccctgctgttgtggatagtattgggccatgaccacgactgacggcgtgaagagcgaaaggtggctagtttctgttcgagtgtaggacgtgcttgggatatctggagagtagcgacaggttaatgtgtggattgttgtagagcttcgaagctccaaatggcctcaataatgttggatgactaagcgactagtcgcccgcggcccagggcccagggcccagtgtaaatgtagggtagagaaatgtctttctttctggatttagaatgtccaacgtttatctgaatttgattggaattggtaaagcaatgtgaaaggtatggttgaatctgcggaaaatctacttggtaatgtttacaggaaattgataccgatgcccagctggagccctttgcggccttcttcaccctttcgcaatgccagaggtaaggaaaagttaagctcgaagcgagcgacaggatgagcgtaaacgataccgaagccagctgcgacactgggcagtccgctttgtagttcagagagtgttgagaccagagcatcctgaacctcaccattagtagtaggagtggctttctgtgaagtctgcagagaaagcaagcggccaccgttcaagaacgcctggaaccgcacgggcttctcagccccaagtcggggaagcgggaacagcagattggcgcttccggcggcgtacacatcaccgcctagggaatcaacgccttcacgaggaccgagaccgcagaggcggaatccacggacgtcagtaggtcctccaagctggaagcggtcattgacacgggacagttgagggcgagggttggactctagtccaagagggtagataagaccagcacggaatccggtggtgaggctaacgccgctgtcacccttaattcctgggatgggaatagggatggcaccttgtgtctcaatttccgacttccagaaagatacatcgcccttcagcgggccaaatccagccagctcattgaaggccttggcatagtacccacgagatggcagcaaggcattgtcccgctggtcgttaacccagctatggaagatgctgctcttcacgctgtcacctgcatctgcgcggacagtaggtgaggcgttctccgcaaggccagtgagctgtctccagaaaccggtgtatccaaattcgtgatggtggcctgatttggacatccatcggagcttactccaaccacccttgagaacctcctcgtgactcgcccaagacttctgtgtggaacttgcaataccgccaatttctaggcggaaatcgggatcacctaagatcggggtctcgaatgcagcctggtaagcggaccgtgtccgggtaccgagcgaagcgttcaaatttaaagtctcggcaccaccaaagacattgcgccagagaagattaccgtaggctgaaccttcagcattgcccaagtctgttccagtcttcatcagcacacgggacttctctcgcgtcgccagatggacatcgatgttgcgcatgccattttggccttgcgactcatccaagtagaccgaaataggctggtggaatagatctgagatgatgttagtagatacccatcatcattgctattatcccatcgtctcataccgaaacgtccaagtttatctgcggtagccgacacttcccgcaacgcctcagacagtgtatagggccgacccttgtttgcactcaaaagggggctcaagttgcgctcaaggaagcttcgtctggtatgaggagcactggtgacttgaacagaagagatggtgcagggcagggtcgaattttcgtcgatctaataaatattgcgatcagccgggaactccgcaagtaaacgcgaattggctgtcatcggcttctagatgtgaagaccataccaattcagcgagtcgatcctgagccttttggtaaatggcttgcatgcgctcattcacggcctgctgttgctcttccaacaccttagggtctgctcgctgttgcaaacgttcgaagatctagaagcggatagaagtcaatagagggtcaactgagcatttaggcagttcatgagctgcctaaggtatgcactgacgctatcatctccggcagcaaaagaggaagacatttttgcggctgcaatggccagaactttcggcctccggggaatagatcgggggtgcgtgccaaacccgcaagatatggaaccagcacgtgacctggcgaacgtgagcgcctgattgcgacaatctatcttctgactccgcaacttctttcactgttcattttatttcctgggactcgctttcccagtactcataaacaccgacttgtcttattctacttcgcaaactttattgcttctgctatcgcttctgctccaatcactaaagatggcgacaaaagcggctttcaaacgggtaagtggccagacctaaggtcaatcggttatccgtgaatcgtgtctaattattatagctcactcgtgaataccaaaatatccaaaaagatcccacgccatatattgtgacccacccatctgagactaatatccttgagtaagtgatatacaccccctcgagctaccgcagaacctcgaagctaacctgctccagatggcattatatcctcactggacctccggggactccttatgaaaacggacagtactggggtacactgatattccctccagagtacccattcgctccccccgccattcgcatgcacacacccagtggtcgattccagccttccactcgactctgtctaagcattagtgatttccacccgaaatcattcaaccccgcctgggaagtttcgactattctcatcggtcttctctctttcatgaccagtgaagaaatgaccacaggaagtgtcagtggttcggaaagtgagcgcagagtgcttgccgcacgatctcggtggtggaactcgaccggaggaggttctcatgtcagcgccactgccggtgtcactcgaacttccaaaggtatcaacaatgtcaaggcgggagatggaggcttaaagttccgcacagaatggaccgaactcgaccaggaaaattgggcttggatgaaagagcatcgcatcgattctgccaccggtcagattttaccggatcccgacgcgcccaccaagtgttctccagagacaagtgctttacgtcgacgtcccaacggtagtgctcctggaattggttccgtcgtggatggtggaaatgtcgcgagagaggctggtcaaggctgggccagacgaaaccgaatctggatatgtgttgctgtcttctttggctatgcgttgatctcgcgactattgagtgatatgcgagtatgagactgaaatagtttcttcatgttgaataccctttcctttgtcttcatgtcttatcctcgcctttccttctttgtccttagcgggttgcaagcattatttgggcgtcatggggttttttttctcagattctccaagattctccaagtccaagacaataaagtccaattattgaatacccgaagaccatttgattccgagtatataggttacaccgttgagcaccggatcatcccagacgagcgctgagttgggcttgtgctcgcccccgcattggcaacgtaactacgctccttttctcttctaaatccgccttcatccaactgcatagcctgttatccacttcgttattggtttgtcttctgtgttttacctcttttttctttgcattccgaacttggctcttcggatggatcatctgcagcctttcacctttggttctacccattcaggtcagtgcatctctagttgatatacctgatattagggaatctggccttattgaactctgaatcccgttcgcttctttttgcctctgttgcctcgtttgcctccttcgaggtcaacttcccgtcaattttgagtgatattgctctttgtttcctatttgtctggttatggacttccccatcagtcagcagtgttagagttgcagcaaagagatccccctcgatcatcaagagcttggactgaaatccccccactagaacccaaggctaaacctgcgccgctggatcggccttcttttacattcatcgatcacgacgatgacttgacctccaaaaggattaaagatgtcaatgcacgcaaggctattcgttcccatgttatgcgcgatgtacgccgacgggagagacttgctgggttgaagcgaacatccagacagaatcgcgggcaatccaatgcttccaaggctaccattaatgaatcagatgaacaaagactggtgctgagggcttcatctcagtcctccgcttcgtcttccatactggatacagactccggagacggttttacgtcaatttaccgtgggcgtcctgtcaggtggtgtgctggttatcctttgcctctccattcaaatcccaacccacctacatcatggtttcttgatcctttctttacgttgcccggtactagtgagcttccttcgatggttgcacacttggtgtactactgtaagtattactcattcaaccttgtctatcctagtcgttctaggtgttcataccgcatgagcctccccagaactagagctgaccacatggcgaagggaaaaccatattcgtaccgatgacttttccgaacacgagcaaagattcaaagcaagagatggaactaatggttagatcctcattctctgacccgggaagtttctttgggctgatgagcatgtgcgctgcacatcgagccgttctcgcgagccagcgatcgggcaattgggactcggtgcttaccaacgaccctgactattgtatgatgagagcaaagtccattcaagagatgagcgcaaaagtacgggatccgaatcgcagactcagcaatgaggcatttgataccatagtcaacctcctcactggctcggtatggattctattcgtgacttcggattgcagtgttgctaacagtccacagctaattatcggagagttcagcgaggtccatactcacctaacagggcttaaaagtatggtcgacctgcggggtggaataacagatgagagtatccgttcctcctctatgttgtctgccatcatcacgtacgtgtgttttcggtccacctctttactaagctccgctcacggttgatgaaatagaaccgacatcaaagccgcgtcaggattgatgaccaaacctgttttcccattgacttgggatgcacagccaattccttcggagatccaacagcgaatcagaccactggcttcgtcccctctcaacagactaggcacgggattttctgtcaacacgtttctcagtcctcccttactgaaaattataagtgtgcttcgtgacatggtattctttagcatcacctatcagacaaatcccacggtcatcaaacctggcgaccaagactttttccgcatcctcaactgcgaaacagagcatcaacttctcagctatatctatgcagaaggttcccccaacccggagcccaatcttcatccgatcgaagcagtcactcgagtggctgctatttgttatctcaatcattttctgattgtctcgccttcatcatctggattgggtcgagcccttacgaaacacctcaaaacagcgttggatagctgcaaattgtctcttcttgtaggactgccaaagcaaaacttcggactgtacgtttgggcattatttatcggagcccaaggtgcccttggacagcctgagagacaatggtttgtggagcggctagcccgtgtcgcaatgatatgtggatggcagtcgtgggagcaaatttcaaaacttatggccgaatttttcttcgttacagctttggacagcttgaattggcgctctatctgggatgaagcaatgactggatttgtgatatccgagtcggaggaactggaattctcgtctcttcttggaacgggtgcactctcccttacttagctctcaattatgagcgcttgtatattttgcgctgcataatcaacatcaagtgtaataataaaccgaaagaaataacagaaagaaagtccgtgaagtagatatataaagatgaagtataaaattcaccgttttagactcggcctatcacgtggcacctttatgtcatcaaaaaagtccgctttctccggtcttttatcgcttttgctttcgtcttgaattttaccattcaatttcgttgcttcatacttcaaaatgggttggttctgggcagatactccgcaagctcctgcagtctcgatcccacatgcatcctcaaacgcatctcctccggttcgtttcccgcatactgtacagctttgatcatttagactgactcttatctaaagccgggatgcccgatgcatgaatccggctcgaagccctcagcctcgccagcacctgctgctgaactccctagcagctgccccatgaaatcgaaagactctccattctactctgctccaaaatcaacaccggcgcaaacaccgcagccacccgacaccgcggcgcagccctcaaccctttcgaagctcaatcctttgaactacatgttctcgtctatctctcaagagcgcgccgccaatcaaactgttgaccttcccgttgagcgcgaaggctcatcaattccaagaggcgacggcgaaggtaactgggagtatccgtctccgcaacaaatgtacaacgctatgttgcgcaaaggacacacagatacaccccaggatgcggtggagtcgatggttgcagtgcacaacttcctgaacgaaggtgcctgggacgaaatcgtgggatgggagcgcgtattcgccaagggactcaagtctggatgggagcactgccgccgcggcgaggaaaacctgagcatggacctgacctatgcagacgagaatggtaaattcgattcgacccccgagcctcgtctgctccggttccagggtcggccgcaagagtggtcaccgaaggcacagatataccagatactgagctgggcgtacccaagcaagtttcagtaaggactgtcctcgcgatatttacaataggcaaaattctgactccacttccaacaggacaagccctccatttgaccgtcacgattggtatgtcgtccgccagacaccttcaggcccgaaggaagttcgatacgtgatcgattactactctggggatccagatcctcacggactgcctgtcttccaccttgatatccgccctgcgttagatacaccgaccgccgctgttgagcgcctaatgaggtggggaggtgacgtctggtggagggctagcggtgcagctgttcgtgaacagacctcgcgctaagagtgtttgacagctgcaacaaccaggctgtctgcttctccactccactctgtaattattcaaaggcatggcgctggcgttccattgtttatcttcgcttgtccttgtacgatgtttatcttccctcttgtgttatatcgcaacctccgttagtctttggaaatagacacatgataatgatatctttgcattaattttacttccgcttccccaaagatcagaagtttcacgttttggtagcagatttctttaaaaaaaagtaagtgtatttctctaaaatccaccgagtatggctgcgctttcatcattcaacgggcatcccatctaagctttcatatcaacagtgaagaattgggtgtgtatggtacaaaataagaacggtggatggtcttatatattaggggaaagttggtcgtacttgacgcaatgctcaacactctcgatgctggcctgcagcattccacgagcctccaggccgacccaaacccagagcattgagtagtcgcccgagcgcacagtttccaagaatgaacggccagaccccaattgtcgtagaataggaagtgcactagacaaagtcagcttcagttgaacaagtagaaagcctcgtggaagagaaaactcacctcttaaacaggtctagattggggttcaaactacgtcctattccttcaagcagaagacatgaaatgacgacgttgacaaaatctccttcaaaccgaacatggtgtccgcggaccatagtcaatacctcactaaggatatcaccaatcttgacactccccagagcgaaggttcgagacttgatactcagaaccaaatgctgcattttcagtgcaaatacctccgggtcaatgacatcttccggtgttcggcaccgctcgaccataagctgaccagcccggtatccgtcgaattcagcaatagctcgaaagaggtccaggaagttccgtcggttggtctcatttagctgggtgacaagaccagtgtcgataaatatcaactgcggacgatacccctcgtcgttgagctgggaaagagcagccttccagtcctccgggtcattgagatgcggacgtaaccgcttgaggactgcctctgtcacatcaacttcggcccgtgtcggggcatcgaacgcacgcgaatgcttgcgaagggagaggtctagctcgctaggcctgtagaaacgaaccatgatgttccccggatggagatcggcatggataaaattgtctatgagcagcatatgcaaaaatgcatcgaggccttcattagcaatctcgtgctgatatagaccccctccaatatccaagaaggtggccaacggaatgccctgggcaaattcctcaaccaacacctcacgggtggtgtattctaagtatgggtatgggaaccaagcagtagtgcgagaattgaacttctggcggaatatgacgagattggcggcttcaattcgaaggtctagttgtagtttcatcatttcaccaaactgttgtacttcgtcggggaaagaaagccagtgcatcgtggggatgacattgatcatgtgagcaaaaaatgacatgatccgcaggtctctatggatcatttgatcaacactggggtgctgcaccttgatcgcaacatacgatgatggcacccgctgcggggagctcttgactagcacgtcgacattttttcgaaccttctcgcccagtgtttgtggttcgattcccagttcttcttcattggttgcagcaaggttcggtttcaacttcgccttatagacctgtgcaatcgcaccaacgcccagcggttcctcctggaactcttcgaatatgtcctcgaatggcagtccgttgaatgctttgcagataatacgcttcgtttggtaaagtgagtgggcgggggcatttgagtgaagtgacgacattatgttgcacatttccggtgggaagatatctgtccgtgaagcagcccattggccgagctattcaagaagtcagcttgtaagttccgtctcaatggacagttattagccaaccaaacgtaccttgataaacgcaggaccggcccgttccattgccttgaccaagaaccgataccaccacaatgtgccagaccgcgcgccatcccggccctgcactttgcgaccaagccagatggcaggcaccgtggcgacgaccggaatgaatatgatggcaaggtgcacgaatcggatccctgtagcaatagggtcatagacatagcaataaaaatagacccatgctgtctgacagagcttcgaaaaaccttgcgcgtcgggtgagaccatcttccgtacctcctcgcgcgaagcctccagcatctgcatttccgcggtcttatcgtggccatcattctctgccgccagtttcaaaaaggccgctggtgccagagtggccatgagcaccccacctattacgggagccctccgcggggtgccttttagttgccgaggccatagcggacgactgaaatattgtcgggggagacgcggaagcccgcgtttgagacagaaacggccgaagagaccggccgccctcatgttatcatgcaggcgtataatattaacatagaatcacgaagttagtagaaaggtcgaggtagaagtaacgagtagccttggagtagaattcctagtcaagatcctggacgataaacaccgtgctgcgacgtcattatatgagcgcgggtagataaaaaggacaaacataacaaacataacaaacatagcaaacaagacaaatcccatcatgtgagcatatacatatcacctgtacagtactcggtacataagttataacctagctaatgataaaagtaaccctaactgctcattgcaggctctagttaatcttctaaagtggtggtcgaaatttgcattctgcaacaacattcctcgtcttttgtccgcttgcaattaaccattgccgaatccggcaatgtccactgcagatcctagctctttatcaaggagaaacagttgaggggtagatcttgctttatagcggtttctattagtgactgctatgattttcatgtcccgaaaacggatcctcgagccctattcaaacggccggaaaaatggtcttgtttgacattaaatcgggccatgatgcccagagatccagagaggctttttcattatcttcagtgtctcaaacgattgccagatggagcgggagttgttgaccatgagtcgtacccagaaccttcgcgatattgagtcgaacaatgagaaaaagcactcgcactggcgcgattgggcctttgtccttctgtggggtgctactggctatgcgtgcatcattttgatggtgttgctctactctaacccgaagcttatacccttcgatatctgttcattgctgtttcgcaaggagatttctccattcttcgcattctcgcaaggaacgggtcattactccaagccccaaggcttcaagatagtcgctctagttcccttccattaccatgggcgtaccgaaatattggactgctatttgcaggtatgcacaatcctgccgctactatattgcttgagtctaacataattcaagaaaaacttggtccataataatggatttcttgatcaggtcatctttgtgccgcagactgatgacgctgtcgacatggaatggctttattcgatcgtgaatcaaacacccgagtatgccatttcttctcgatatcatgagatagaatgggaagttgcaaagaataatgtgatgtacatccgaatcgacggcgatatcgtgttcctggaggacaacgccattccgaccatcgtcaaaacgaaactcgacaatccaagcacgctgatggtatcggccaatgtgataaacgaggcagctctcgcatctctccacagtcatccgggaactgcactcccatatctacctgaattgtacgatgtggaacaaccgtcccgatcaaagcttcaactgaagcacgactggcgagcttcgaatcttccaaactggcagggcccgccgagcttcaaaataagcaaagactttgatccgccatttgaagggcatcgctggctactccccagggatgcgggttctgatcgagatcctatcgcgagatccgtatacaccgacaccggtccaaccctgcatgactggactgttggtgcgcagcaacattactcctttttacaccacctagaacacaatgatttgggccgttacaagttcccgatgtgggtcgatccaaccgagcccaccagcgataattttgggtgcttctggggtaatgatgcagtggatgtgcaccgtattttccgcaacaaccaaaatggatcctcccacaattggcatatgtcggatggctctcgtccgcatatcattatagatggcaaggggcttgtttcacattattctgctcgccaaggtgcggctggtctagacgccacggatctcataactcgttaccgagcatatgcgcaggagaaagtgtgtttgcagactgagtgatctcccgacaactctgggtatcagactgtgtcaattaacggaggaacttacatgtacatatacgtatatacccaacgattttgttcaacttttgcacgtctacaactaggttcttaaaagaagtagattctttttacccgggtgctcatggtacatacaacctctctctccaattaagcatctgttacagccttcagctgtgaggcattgactttcaccaagtcttccagcataccccgataacccacaggaagtgcaccagactattttccggttagcaaatgactagcattattccagggcagaaagctcacgtcgttcgccagcagcccttgcacaagtacaaaagcattgtcacggtctttgatctcttgcgacttgtctgtctcctcggccttatcttgattgggagtgcccccgcctagggtcgtcttgagtaactcggtaacttctgtcttgtgcaggcagtctacaacggcggcacaaccgagtttgtttgtggccattagagctagagcaaaccagccttcactgcgaacgacaggccactgagtctgtgtgatcatcgcacctattggcagcgaaacaccctcgtgcagggtgtacagtctgtcaagcaaggaggttgcttcgtcgtctccatcgcgagccttggggctgacagttcgacagatcgaagcaactgtccgcccaatctcagttttgattggcgtggagtcggttttctcgaaaagagataggagtagagagagataggtccgttggtgagccggggaatcaagatcttgtgagaggggagcaagaaggcgggagatgttatccgtcgaggatataatcacttggcgcgcaatacttgcagccgagaattgaacctgtggaacagattcatatgcccataatcgtgagatggcaggaatgataccagcttctccaagaatggctctattgtcaccggcaattgcaagattcttcaggaaaccaagcgaggagtgcagaaccgctccccgagaatcgctcttgagaacggatatcaattctccgtgtattttcaagtctcggaccattacctggcagacctcgtcggaccgggcgagatttccaagcatgacacaggcacagacctgaaattggtcctcggttgcaaccacccatgacttcaatgtctgtgaaagaggagagtcaagggggtagtattgggcgaaaaatggtgaggctgacacctcagccaaagcctggttaatcttgagacggagctgcgcgagagccttgacgtcttcgttcgaagaagggtccaccacaatcgaaaatgaatggcgcaggacgtccagcaagccttccaccattccattcgacacgcagacattctggaacctttcattttctaggtaagcagcaagagaagtcaccaatgatgaaaaatgtgcaaagtcaagagtatcatcaatggcaagctccatcagaagtacaattgttccgtcgggagagtgttcaatgccctcggctgtaagttatatgttagatcggaagatagaccgaggttaaagataaagtataccttgctctgaggccagctcaatcaaatcgtaggaaaaattgagtagagcctcattgtcttcgatctcgccatctttgatcagcttcaataaaatgtacgctgtccgattggcagctatctggacatgtgctggttctgatatcacattagcgaaacgtgcattatttggctctttctagacatactgtaatccatgcaaatattgtagatgaccggaatggcaacaaaaatcaaatcgggatcgaggaagtagcgaatgatagcaagggtgtagtttcccttgacaacaatttccctattctcatctgcatcaactttagttatctgggcacatatattagtaaattcagcatacctgtatcggcacatgagtttccaataactcgtaaagagtggagtaacaacctggtatcaacttcgcccttcaaagaaactacatccaggaagaagttcaaaacaccagactggccaaatggagcacgccacgaagctgaatcataattagcaatttgtaaaattaagaaatagataggattgacccacgatctctgctaccatccgcaataatctcagtcgcttgaaccaagtattcggagttacaagcccagagcttttgcagggtggcgttcacgctttgtagagtgtcggcatcccgtcgccctcgttttgtgtttgcatcggcctcttcaagagatgcatggagctccttgagatcgaagctatttccagcctcgtcaaccgcctgggccttttcaatgatctcccgcaatccacggaacatctcctgttgctcttccgagccaatggtttccgtgcgtggtggcaaagaagaagaaacctccggtagatctgagagaatctttttgataggaggcaattccaaatccccctttttcgagactgagtggccagcatctccatgaatggccagctgggcggtagatatacccgcgtcagacatgttgccgaatcgagatcagatagttgccttcggggtgtggattaaattggaaggtccgtgttgagttgaagatatgaagatacgaattccttgaccgaacgggcaaggccttctcagttagacggaggagcctaggtggcagcctgttgaccccgtcgcaacaatttaaacactgtaaacaaacagcgtttactctgatatgagaatactagtggctttaaatcaggcaacagagcctaaaatggattcttgatattagtggaagacaagcggctcaccagaattctcgcagatacaaagtaagtttagctcttcgtggagagagggatgctgcctgaggtggattcaggcaccaatctcttttgggttaggcccgagtatagtgagatatcgttttctgccggacattgtgtcttcacttggattaaataatataaacgcatagttaactagctatgtacatagttattagttatctatctatcccctcggatcaagtctccattcaggcttgtgatcacgtgctccgctcagacgtgtatgttgtaggaagcttgtagaagaaatccgatgaggagtatatctattccgaaaaaaatatattatcactttgatttttaggctgttctctcactagggagttttggctatttcgatataggatataggcccgattgaagggaggagaaaaaaagaaagaaaaaaaaggatggagctgcgcggaatcgaaccacgatattcaaggaatgaatcatgataatttcccgttagggagaatcacataagcttgatggactaaccattatcctacagttccttaaccagtagcctatagcttctaattttgggagaaatgaccattaaagtgtggtcgtcttcgcaaatctttcaatcttagtacaccatgtactagttaagacgttcagcattccgaagttaactagttagtatgtattatcttatagttaagcacctcttttgcttagtattataatttaaaggtagataaatccataaaattctttccttggcgtagggtctagggcaagttcgggattgtggtctttggctcccgtatgtgtaccttccgactagttatctgactctagaatgataatctttttttttttataaaaaaaaaaaacacggacatccggagggaactgcaatatattctgttttaactcggcaatatcggacttatctcggtgatcaatggacgtatcagtgcccatataagtgcacgtgcagatggtcactctccccgtactaaatacatgatcattcatcgcccacgcaattttccataaattgcggatgtatcagccttccgcagttggagggtcagtcctggaggtatcacctgcatttaaaaacagatacttgagccttggagcgccggagattggagattagtaatgaggtattgttacagtagctcgggggaataatgcgtggtatatatctatatgggaacagatatgtgcatagttattgattatcaatgcctgttcgactcccactcaaatcatgtataagtgtacactgtcggacatcaatatctagtcgcatttgacagggcctatttggatcagtggagtctcattgtcttttcctatatccaattaaagagctgtaaaataatcgtcgtaatctattagggatgtggggtataaagcgagggttagttagtctacctttaatactgtaaaagaagtaatcgaacagggcatcagacacctcgatattgtcgtcgctaatgccggcattgccgaatcatatccacccgtcaaggatatcaggcaggccgatgtagtcgagcatattccaacgtgttaggtgtcatgtcgttgtactaggctgcgcgcagtctactgtagaagtcagccggaaagcattataggatccggggccggtggtctggcgtatatctgctcggatttgggacacagtaaatagaagcaaattatccaacctccagtcccaagtgcggcgtatcgcgcatcgaaatcacttgccaactggtatgatgttcggatcaacgaggataagaggctcaatgcgtttgtcttggattccgcctgggtgcagaccgacatggacaatgctgctgcacagctttggacctgtaggaggtgccgaagacccatgagaagccaattaccgggataattgaggtcttgagcactggaaccaaggagtagtatggcggcaaattcgtggtgaggttcaggattggtgatcatgggcagatcggaccaaattagggtttctcacatgaagttattttcgataccaaagacatgggagcttaatgccatatcaatgactctagccactatgacaatggtcaagcatagaaataggagaggtcccgaggtccgggagtcaactgctgacataatatagttcgtgccggcgtgctcaaaacggatctcactgctctgttcgttcttctctcttgatcttttgatatacctttcaaacatatgggataatttatatagaagaattatatatttaataaggtcatatacatagtaaccatctaaaatccaaatcccctgttaagagatcactagttatagacttggcaggtacacaagaccagtgacccggtccggggcgccaagaagcgcatcgcccaagctggcctttaccgcatacagcactgcaaaactccgagtcgaatccttcattttcgctgcaataacccggtgctatcttcacgattgacctctcttctctcctttgtgaacctcctatcgtgtcgaccaatctcaccatgacacgcgctgtccagaccctctccgttcttctccttgtctcctcggtatgctacggagtcccttcatctcagaaaggaacacaatcccgcatggatatcactgacaatcgatcagctctacctttcccttttccttggactcgttcccctgaacgagactgtccagactgaagtcattccagttgtacgttacccaccccgtcaatcctccgctccccggacttcgagtgtgtcgaatgagataaaagctaacctacaatcacccagctcccattctacgcgcttattgtctttgcttgctacctcctcgcccgcctgggtgtggcgatcttcaccttcaacgacgtccccgaggcacacgctgagctacaaaaggagatcgagcttgccaaggtggagttgcgccagggcaaggttgaggttgattgattgagagatggctgtgcgcattggttagatggataaccagacactcggaaccaaccttggcatacaaggtctgggcctgggtctggattggattatgtctttgcaggattgaaaaggctgcgccggatcaatataatacgctatgccccagtgactttttgtttccgctaccaatggtatattctcttgatacacttctacaattcaatgtctgcaaagcaacgttggaggaccaggtttccggttgttggctacaacgagactcccggtgattacggggcactccgtttcagaaaaaaaaaaaggagcaaggagtgcaatagcagtttcaaggcaaaaggtcttttgggggcagccagccggtctgccaatctgccaaaattaaagaactttttctatagaaattcatcaaggatatcgtaaaaattacatgctcaggtttgtgcacctggtctaagcatggacagcaaaatcgaggattaaaagtgtcccaaatatgaaccatcagagcatcgcacaaaagggaatgcttatgataatgtaatcatttgcttaaacaacctgaggagagggttctccttgaaccgcctcagtagaggcttcttcgacatgcttttggggaatattgacgataggggacaatttggcctgactatcgtgctcttcaatattcctacagggaaaaaaaaatcagccacaatccacaatccagaagatataaagttgggggtataacatactcagcctcccaagggtagcagatccagacatccccagtggtgaccgcggcgtggtaacgctggtcattgtccgtcatatctgtgggcagctcacccttcttgggctttttcttgttctattccagctgtcagccaaacctatcaactcaaccttcagataaaataaacaacatacgtgcagaacgaagacaaagaatttagtctccttgtccttcctcggatcattggcagggagctgcttctgagcttttttaacatcctcctcgagctcgttcacggcgtattgtagggttgtgcgagtatcatcgacctcgtcgacgataagaacgttcttgccgatcaagttggccatcgaggagttcatgtcgagccattgcaaacgggtgaccttggtaccggggacctcctcaacgctgtctgtgcccaatttttcgtagagggacagaccgatggcttgaatggggatgttagattgaccaggcttcttgaggaaggacctgtttagcgagtaaggatcaatatagtcgagatgaaggagcacgtgtgaactgaacgtaccggaggatgcgggcagggatgtaaccaccaccaccgatggcgattataaggttgatgtcccagttcgcgaggggctctttcgccgagttcttgcagagattgtggacctgtgaaggatatttgtattagtttcagtccttttaaagttccgagtgatgacaattgtggactgcgataagagacaatctgcattttgcggggttgagggggaccttgatgatattcatgtgtgtttgtgatgtcttcaacctcttcttttttaaaactaacacaacgacatagtgtctagtcaatagaccgggattcttacatcgttgtatgtggcatattgcttgttttccgacatgttggcgattgtgatggtttcgaaattggatggagatatgaagaagataaatgatatcccaataaagatcaagtatcaagaagtgaggtagctgtcgaatgttttcccacagagaaggaaaaaatggaggggaaaaaaaggaaaaaaaaaaaagtcggaccgaaaggttatcggcccgtccacgggtgtgcggggcttttatctgtagacacttctatgttgtgcagcttgacccgggatatattcatattcacattcatattgacatgcattccattcgaatctataatatctaagtataccaactaggctcgggcacttcatgtagtagtgcatatcgtcccaattctcgattcttgtaagccaccggatcatgaagagtgtgcacgcgaatatcccgccagaatcgatccaatccaaccttggaggcggtggctcgggctccagtcacttcaaatacaccagaagtaaccctgagtccgacatctgtggcaaccaccttgacgctagccacccactccgcaacctctccacgttcctgggcggtgagatcagatttatgcgcctggtatcgagtataaagccctgagagttgatcgcctgctcgatcggcaagggcttctgtggcacgcagatgcgcaaagaagttaccatagcgctcgaggatgtagaactcatccgttgcggattccttgttgtcgccgccgaaaggccaagcccgtgttgcggttttagtatatttggaggcgaaatctaaagcaccaagggcaatgcccaagtagaaattgctgaaaaccagttggatgctgtggggaagagcgaaagtcagcattcagccatgtaactgctgaggaagcatgacatatggaatggcatagacagcactcacgttggcaggagtagagtggggaatgcgatcttcagggtgtcatcgcgaggcctcttagtagctgcatcccagcccagtgcatctgaccaagaagcacggacattgtcaatctttacgcctccagactcggtcaggcgcaacccaatgttgtgccagttgtgagcaaactggataccaggctgttgggtcttgaccaaagcaaagatatgatcctgggtaccatccaatataccttcaaggactgtaagatcggacacaacgcctccagtgttgaagtacttgttcccggtgaatacgatatcgtctccgtctggggtgatattcagatcggcgtcgcgggcgttcacagcgccaccgacaaagtagttgtttgaaatgatcaactgatgggttcggtcggcttgttcaggagtgcccaccacgtttgcaatggtagaccagagaaggtgatagccaagcagcataccaatagatctgtcttcttgttagggactatccttcggattcataagggatgttgggatgttacccatctgcctttgcaacctctctgattgccttatatccaacgctccagggttgctcgccaccaccatacttcttcggtcccagaagctttgtcaagcccgaatgcttgagcagggccacttcggcgcggggtgatttgttctcctggtctctttgggccgcatccttggctagcacctcggagacctcccgggctctaacgatccatgcctcttcggtgtccggcagattggaccatgtggtttcatattcggcgtagacagccggatctgtcgctggagcactagattgggacatggcggaagggtatatgcagtatggttgatcagttcaagttctatttagatcaatggactatttcttttcatgggtgggatatgagagagtttataaatagtttccttgcggggggagatcttacatgcttgtcactccatatcacgcaatgccgtgtcactccaacacccaaaaatgagatccataaaacttcggattcgtcagattcgtcagacaaatacaatatgtcgttattatcgtcaaagtagcgccataattcaattaaggcgttccctgttgcgtacacccgggcgaccgctcatacttagatccttgccaacactgcttgctcgttcatcaagttcagaatctctctacgtaaattctctctgcgtaaattgaatggcctatatttgtggtaccaatgcctgtagataaataccccgcagaatggtatcgaacaaactgtagctcgttgtggtttgaccaacaggcccggaaggggagggcgactgttaccccacccgaaaagcatcgactgttcaatgtatccatgttcaatgtatccatgatgcttggacaagcaaaacctggtgagatgaccgcaggcattatgatcgtgcgatttgatgtgaatcatatgaagctcctgcttcatccactatcctccagaagattctggggtgaccagtactctttctcagggctctgggcatccaaccacactagcccatcagcaagcaagtcatctattacggtttgcgctcgagctttttcccatttgaggttcaaccgcagcattgaaacgctcacaaatcccagcacctgaattacttccaagactgttgcctgatcggtgttgagttctttagggacggaccgaatgtactgcttgctgccgaccttaatgatggagaacccggaaccaagaggctcaagagaccgaactgctcgcaggatgtcgtcactgtcgattacgtatttcagtcagtcccttgtgtagatatccgtatttcctgaaagaacaacttcatactctgaaacctcgagcccacttccgatcgccttgcgcttccctactctcttccgacactcttcaacaccaatcagcccaccattttcgctcctcgtctctctgcacagctcgacaactctgactgcaacctcaaagtagaagtcattcatatctccgcccataatctgggtccagaagctacccccctctcccagtccgcggcggccattcttgcccttgacgttgcttgcggcaaggggatcaaccccgatggtgttgcacatgcgcgcaaactctgctcggaacgtcgggttggactttatcgtagagctatgttctagcgcaaatgtgtggagcaacgactggaaaaccgacaactgggtctgtagggaggcagtatgcgtagagcggagattggcgccatgagtggcataagattgcgttgcctgagttcgatttgcaaaggccccgaggccaactccgcgacgagacatagtatatagagtgtaaggggaatcacttgataggttacatgtatgtagttaccccaggcggtcacccatgaagtcactgataagagacaaacccttatccagatcacgataagggctgagcccataacgggctagcgctagttggtttataggctaaccgtatacggctaggcggtccacacccacacaagcgaagtctcttcttacattccttttcttcgagctttttcttcttcccttgacatccttcgacaaccagccgactctcgacctcgtccggaccttcaaaatggccgctactacgtatgattcccattgacttcttcctaagactgatgcgatctctgcttgagtttgtaaggttgctggtatagtcgtccttctcgctggggatgccagctgtttgtccacaacaatgacggctaggcaccagctcgatccttcctgccctctatctcgattccaattatctcggatacacttcttgtatatcatggagcatttggatacagaaaaaagggtgatggagtcttgaggttgaaagcgcttggcgccttctcctccaaaaatattgttgtgaactatcgttctcgggcgctcatgatgtggtaacagcgtcttgatcctgaagcgacaaagtgtcaacatatatttcctgaacattgttcggggttttgtcggatgaaggcatcaatggcatcttgcgggtgatccggcttacgaacactatgctggaatatgcatagctagtactgaactgtaaacgatcattaaactccgatgccttggccctcactgattaaagacatttcgtcgagttattttatgccttcagttgagaatgtggcgctatatgctgcaattctttcactcggcgaattgtctcagtctcgatctatttcggacagactgttctaacactgcacagctccgttcccacccagaaccaggtcctcgttcccgagacccttctgaagaagcgcaagtcccaagaggctgcccgcgctgagcgccgtgccgaggccgagaagaccaagaaggtcagttttcccgatttttttcccacattgcgacacctcccttccaactacatgatgcataacaccattcacgatgactagaccgctaccacggtcaatgctgtcgtctgtcaaccatctttcgggtctgacattagttacacaactatttgccattttcttcacaagactttggagactctcatgctgactgagattcatataggccaacaaggagaagcgtggtgtcatcttcaagcgtgccgagtcctacgttcaggagtaccgcactgctgagcgcgagaagatccgcctcaaccgcgttgctcgccaggagggcagcttctttgttgagggtgagcccaagctcgtcttcgttgtccgtatcaagggtatcaacaagattgctcccaagccccgcaagatcctccagcttttgcgtctgctccagatcaactctggtactttcattcgtctcaccaaggctactcaggagatgttgactatcgtcaacccctacattgcctacggttaccccaacctgaagtccgtccgcgagcttctgtacaagcgtggttacggaaaggtcgacaagcagcgcactcccctcaccgacaaccagatcattgaggagcacctcggcaagttcggcattgtctgcatggaggatttgatccacgagatttacaccgttggccccaacttcaagcaggccaacaacttcctctggcccttcaagctgtccaaccctaacggtggtttccgcactcgcaagttcaagcactacatcgagggtggtgacaccggtaaccgtgaggagaacatcaacggtctcatccgccagatgaactagatttattctcatgaggaactcgggttggagcgttctctgagcgcacttcttaaaaagttacaaaaattttacgactttactgtcttgggttgtttttttgcacgggctgtttatatccactagtcaattctttagcgatacgatggtctggggtttccgatcaatttaatgcttcaaacaacccaattgcatggtcgtggacttggttcctgtcgtacgttttctcgtaactgttaactgtattccacgactgactgtcccagggctgggcagtcttcaatctacaacactgtatcggagccctttggtagtaatcaggattttgttaggccgaatactatcccgaggtcggaattccatgtcgttgagctaccctataggctatttttgaagctgtgctgaagccgcacgatcttatgatgcccatcatctcgataagctcattattgtagtcaaccagttggctttagtggtctcatgttttgtctagaccgtgagtgactggtcaattcatggcatgaatgtgttaatatcatataacattagatttaccaactctttgaataccgagggagatagttatcatcatataatgaagaagtaatcccaactactacagggtctagaatcggagtggacaaatcgaatcttggggtgatatatatctagctgatacctatgtactattgcattccttccaacgtttctacgtcaacattagattttaatgaccctttgaactctcctgttacgattgaccacaaggcagagctgtcgtccctgccagtcagagcccgatgcggatgggttatgtggtccaggcttgaaagcgccttcgcggagggtttcagtaaagagctcgtaggatgggtaatctatatcgataatttcagtcagtatattcagccatcaatagtgttattgctctctcaagtatacacatacagccgtccacaaagttgttgacctgttcttcggtcatcccggtgcccttggcagcacggagtgtgcgttcttgttcctggcgccattcgtagacgaaacgaggggtttcggcatcgctgagactggttagttaaacgaaagtattacagcaacaaagcacatacatatggattaaagcatcaagcttgctgcaaaggaaacccatgtcagcaaaatttatagttgcgcaattgcaaatggcagaataaacccactcggtcaagacatcataccgcttcaaagcgtcatttacagctttaacatcctcaaacttgacatagcctagtcgtccatcatattcgccgttatctttttgacgcacagcggcctcccatttcgcacgcagggtttcgtcatcccacgcacggaacccgacacaccacccttcgaaaatcacgaccttgactttatcctgaccctcttgattgacgacctcccattgtgcctttgggacacgatcaccttggccctcgaatgcagacttgtcatactgtggaatggctgtcggacgttcagcggcgagcgaagcaaacacctcctcacccaatacgaggtcgtgagtcgaaggttgaccacgatgctgcagtagtgggtttgaaggatgcgcttgtgccagagctatctgatcggcatggtcaaggtagatatcatcaagcgatagcgtcacaaccgcgagcgaatatggttccgagcggagggtgtcatggagagcggatacctacggagactggtgttagattccgttccgaggaaattgaacgagatctcgaggcatgggaaattgaccagctctagatcgactcaccagaactgtcttgcccgcaccctgcacgccattgagaccaatgaaaaacggcggaatactggggttgctgcggtgccgctctgtatgaacgcgcaggcgatcgagtatgaaagggatgcagtactgtgacttgtcgtccacgatttcaggcattttggcttagttttaagttgtctatgttatatcgcacgtcttttgtatctatcggctacggtacgcggaaagtttcccccccaatcggccgagtgaatctggggtcatccaccccacggggtatgttcagccgctacttttggctcgacattttaagaacctcggaattttatcaggaagtgcattggatcgagcaacaagacaatggaacagtaaaatagtccttatacgaaaagatgtacaagtgcacatgataatgacgttgcccgtcacatgcctgagtcagcaaagactcggtcccggaagacatttacaacgcttgcacttacaatgatggatatatgcatatgtttcttatgcataagtatagcaatttagtctatatccccgtttattttcattaaatcatcagaatacttaaatcacttgtatacgaagtacgccggcatgtgatacgggacgatctgccattgtaacgatacccccatatttcatggttacaaaaccaaacgtgccgaggtcctccgtttgccgagttgctttaaactcccctcttctccagctttcttcctttatttctttctattatccacttgattttcggacacatcatatatacagaatgtccgagttgcgatttgataaccaaacggtggtcgtcaccggtgccggtggtggtctggggaaagcatatgctcttttcttcgcctcaaggggtgcaaatgtcgtcgtgaacgacctcggtgtctctcacaagggtgagggcaagtcgggaaaagtatgccttatacctccgaactagacaaacagatactgacagctactccaggccgcagatgtcgtcgtcgaggagatccgcgccgctggcggtaaggccgtcgccaactacgatagcgtcgagaacggtgatgctatcatcgagaccgctattaaggccttcggccgcattgatatcctgctcaataacgctggtatcctgcgggatattagctttaagaacatgaaggatgccgactgggatttaatcaacagagtccacacctacggtgcatacaaggtgagcaccctcggagacataaaaacaagcgcttgaaacaggaactgatagccttttctctggacagtgcgcaagagccgcgtggcctcacttccgcaaacaaaagttcggccgtattatcaacactgcctcggctgctggtctattcggcagcttcggccaggccaactactcagctgccaagctcggcccggtcgggtttacccagactcttnnnnnnnnnnnnnnnnnnnnnnnnnnnnnnnnnnnnnnnnnnnnnnnnnnnnnnnnnnnnnnnnnnnnnnnnnnnnnnnnnnnnnnnnnnnnnnnnnnnnnnnnnnnnnnnnnnnnnnnnnnnnnnnnnnnnnnnnnnnnnnnnnnnnnnnnnnnnnnnnnnnnnnnnnnnnnnnnnnnnnnnnnnnnnnnnnnnnnnnnnnnnnnnnnnnnnnnnnnnnnnnnnnnnnnnnnnnnnnnnnnnnnnnnnnnnnnnnnnnnnnnnnnnnnnnnnnnnnnnnnnnnnnncacggacacgcgggccaaggagggtgccaagtacaacattattgcgaacgttattgctcccattggtaagcaagctaaaaaccccaacgcatgaattggaaaagctaatcctaaattagctgccagccgcatgactgcaactgtcatgccaccggatgttctagagaatcttaaacccgactgggtggttcctttggtcgctgctctcgtgcactcatctaacaccactgagaccggtggtatttatgaggtcggtggtggtcacgttgccaagctccgctgggagcgagctaagggtgctctcctgaagactgatgactccctgacccctggtgctatcgcccggaagtggaacgatgtcaacgatttctctcagcccgagtatcccactggccctgcagacttcatggccttcttggaagatggcctgaagacgcctagcgctcagctaggagaggagcctgacttcaagggtcgtgttgccctggtcactggaggtggtgctggtctcggccgtgcatactgtttgcagttcgctaagctcggtgcctctgtggtggtcaacgatcttgttgacccagagcccgttgtcgaggaaatcaagaagctcggtggcaaggctgttggaaacaaggccaactgcgaggacggtgatgccgtcgttaagagcgccattgatgccttcggccgcattgatatcgtggtgaacaacgccggcatcctgcgcgacaaggctttcaccaacatggatgataacctgtggaatgccgttattaatgtccacctccgtggtacctacaaggtgaccaaggctgcctggccctacttcctcaagcagaagtacggccgtgttgtcaacactgccagtaccagcggtatctatggcaacttcggccaggccaactacgctgctgctaagcttggtatcctgggtctttcccgcactctagctttggagggtgcgaagtacaacattaaggtgaacaccattgctcctaatgcgggtaccaatatgacccgtaccattatgcccgaggagatggtccaggctttcaagcccgactatgttgctccccttgtggttttgctgtgctctgacatggctcctgagccctccaccaagggtctctatgagtgtggtagcggttggtttggccgtacccgctggcagcgctctggtggccacggcttccccgtggacgtcaagttgacccccgaagaggtagttcgcaactggaagcagatcaccaactttgatgacggtcgcgctgatcaccccgaggatggccaggccggcgcggagaagatcatggctaacatgtctaatcgcgtgcacggcgatgcctccagcgagaacgatatcctcaagaacattgagaaggccaaggccctttcgagcgagggaactcccttcaactacgaggaccgcgatgtgattttgtacaacctcagcttgggcgccaagcgcacagacttgcctctggtctacgagaacgacgaccacttccaggcccttccctcgtatggtgttgtcccctggttcaacaccactactccctggaacattgacgacttggtgaaggatttctcccccatgatgctgctccacggcgagcagtacatggaggttcgcaagttccccattcccaccgccgccaataccctgacctatcccaagctcattgacgtcatcgacaaaggcaacgcggccatcgtcgtggccgggtacacaacgaaggatgccaagaccggtgaggatctgttctacaacgagtccagcgtcttcatccgcggcagcggcggcttcggaggctctcccaagccgactgccgtgcgtgccaaggctgccactgctgcgtacaaggcgccgcagcgccagcctgatgccgtggttgagcagaagacctctgaggaccaggcagcgctttaccgcctgaacggtgaccgcaatccgctccacatcgaccccgagttcagcaaggttggcggcttcaagacccctatcctgcacggtctgtgctcgctcggtgtttcggccaaggctgtcttctccaagttcggtccctacaagaacctcaaggttcgcttcgcgggtgtcgtcctgcctggccagaccctgaagactgagatgtggaaggagggtaacaccgtcttattccaggccaccgttgttgagactggtaagcctgccattaccggcgccggtgcggagctcctggagggcgctaaggccaagctgtaaaatatgagatctttggttgaagcgatgttgacattagtaaagcgagccggcacagctgggtcggtctgttgcttcttttttgtatatactacctgtgctttttgtttttagtttccccatgatgcatttatcagccgctatctgatctattaactattcctacatatgtacctgtatgtaccggattttaggccacagtcgcgaatttcccgatcggggtgccgccgcttttatgaaggcgctcaggctcctgctcactgagtatttcacagcacgggtgatcactgtgagcacttagcttagtaatgtaaaaatattgctaaaacgagtatcttaaatcacgtgataggtggatcattcatatgtggtcccgaacggatgttagggcctagtatatataccgctgcagtgacaatcggaggttccgattgtccctatgatcttttggccgagtggctaaatgctcttatgtgatcagctaggcgcagcggcctaagaaaccctctggattacaattttgtgtaatactagtcacgtgaccttgtttcttttcgcaaaaaggtgggtccatacctgatttttactatatacaggttttgaaccttgaacactagaggactgcgtactataggggttcacattactagtgtattctagtgcgagtgttgagaaacccagccagttcttagtaactacgtgggatccaaagggaaggcaaaaaaaggcttctcaatgtcgatccagccggaatctaaagactctctatttttatatgtggtcaatctagccagccaggccccactgcaacagtactttccaacctacaggaccctagaccgatccaaaagtactgttgcacctagaccaagaagattaaagactacacccacgtctacagaggcaccctcattaattggctcaatttaaccggatatcgccttgtttggaggtgataaaaatcccctaggaatcttagcagtagtctagtaatatagtaatacaaaatttagggctaacacagaatatatggctcttttcaccataggaagtgcaaatatttagtggcgttatattatcagcgttattgaactctttggactactcagcatcaatcggagcagacctggaaattatttaatatatcctcctgattcattttccttgtggaatttctagttttatttctctggtcgatccatcaattttcaggatatgcatagacgtattgattaaaagccaaaccaacaagcctcaacctcctattaatattttaattaggcttgacagtacttcctgaggtacctccatatgagcaaagtcacgacctacaagatgatatgaaaagaaaaaaccaacaacaacaacaagcaagaagcgaacaaaaagcaaaaaagcaaaacgaagcagaaaagaaatcaagaacacgaggcaaaatgtgagcggtggtaaaccactacactagaataatcccaacgtccgtcatagggtcatcctctgctgaaacgtccttagacacgaagggggggagagagatgacctcttgcataatgtaggtcaagagatcaactaccttaccgtagtttcttccgagggctcggtgggaaacggttgtccactattcataaatcagacacttgccctcagtagtaatgggataattggaccatacctcgctgtcattgtttatttggtgaaaatgaaactcatctccatcactagccatgccgtagacaactgtattgacctttctcagggtcttacgttcttggtgaacgatacctaggagaaaaggggatggttagaaaagtactgttagacatagtctattaagacatacccatgtagccaaggagttgggcctccccagcgctcaccatacccttcttcttggcctcaacgataaccaggttaatcgccttttctgacatcgcacgggtttctccgtaccacaaagtgtaatccgcacgtccgctggttttgtactacctcgtatcgtacaggatcgcgcgagaggtcatgcaggtttcgtgttctaggttcaagggccattgcctatggtcgctagacgcagagacctgatccagcactgagtatagtagaatgtcaatgacgcatcgtgctgctgtttctttttgagtgctgcactagctgcctctttgaactattcctaacatttcgactattagatgtcagtatgtggtcactgagttattgtatccatatgaccaggcagaactgagcaaaatcagggcaatatgtgggaaaacgtaggttattgggatatagcctagccgaaaagtacttccagggaagggacttacgagcacactgtgggagaggggctcctggagggggatgcatccacggggcctggtctgttgggtttggcgttaggcgaaaagcgacttttacttcctttcgggtcattttcccaatggggacctttgggagagggagtgatatctgcccatgttgttgttcggttttggctagaagtgcccagaactcatccttttgttctagtctcagacattctttggcatcctggtatacctgtttcaacaagagggaaggatccttaagtaagtctgaagacggggatatgggggtcggaaattctgatgttggcgaggaatccaaagaggaactcgaagatcctggagacaaatgtgtacccatcggatacgacgatacaggcgccgaagacatggatttctgcgaagaatatgaggcttttcggggcatgattgtgggttaaaatggttgttgtgggttggaagacgaaggggagggaaacgaaagaggaaacagatggatgagggtgactgccaccgcgacccaaaaaattacctcacctcatcgacactctggccgccttcctttttgttcacaattggcaaagaaggcttcggaaaaaccttagtattacctcaggtcttggtatctagaaagcttcgtacgcaatgtacccctttagctgacaatacttttcgcgtgctacatacatgtatccgcctcctttagacgacttcctttcatcaggagtgggagttggttcataaaaaagaatactaccaccttctttctcctccaatatcatttagctcgcctaaccatgaggtataaaaagaaatatgtactttgtagcagtagagatggggataaacgtacgatgtacaacatatcggcactttgctttgagagcgccgatctcagtcagccaccgaatgcgataaattagcttaaggatagagaaaagcagagaaacagaaaagacacagaagagcaaagcaaaagcgatgcagaacaaagtgcaagccaagcgaaacggaaatatcaaaaagaaaaattatcatgcttccttgaaagagacgtcttcaggaggcaaattctccccagaggctgaagcagggggaatggcttttcgggggagtaaatcagggccgagcgttacacccacaaagtccaaatgtacaacgctggtccacagaacccacccttcccatgacatctgtaggataaagaaaacagaggcatcggtttcgaatgcattgcaaatctcaacttccatgttcgacgggagtgagcgaacggcttttgaaaagtcatccacagcgtctcgttgtccctcaagcgtcagcttcaccagcacgtgattttggctcactccagataatggccgagggaggcgggatcgactagtatcactgaacgcaaggctgattgctctggtgccgctaaacgtttcaaacacggcgtggggagcatgcttaggcttctcgacttgtacttgctggtaccactcagccgttgtgaaattctgttggttcttaaacttttggacggcacggaacagtctttgggtaaacgaagcggtatttgagcgtacggacgcaatttcttgaactccacatgccgcaatgatgtgaatgttcgttgtcgagttgggctgccgtgctgcagcagccgcgtggcagcaatcgagtattaccagagaatccactgactgtgcagattccagagtacctctgatagaccgccacagaattcttttgtgacgtgacgtaaagcacaaagcatcatcatgaaggccaccatgaccaacataaaagaaaatgaacagagagggtagtgacgaccggatacattgtccaaggagtttgttgagattctcttgcaggctccaggctggtgttttgtccgaattcgggatcacaaatctgttacattggaccccaagcggtttcagaattgattccattgtcaccatatcattctctgcgccagtttcatcgttttcccaccggatcaatatgccaatctttcgcacatgaaacttgctccgtgcggaagctactttcttcagcgctgcttcaaggtcaggaagctttctggtcgagactggtttggttgggaatgagatggggatagtgcttgggcttgcggccgcaggttgctttgcgggtgactttaagcctggtaactgcgacatcttgctaagagaacaaaatgtcagcctgtgtataaagtgaggggactgatcttagcctcacttctcggtcagatgagactagcagggttgtagaaatcagaagggtgattgttgtttggcaaaaaaaaagtagtagtgcaaaaatcagaaggttgatcgttgtttgaggaaaaaagcaaggagagttaggaaaggggaggagggtggtgtttatatctgtgattttgctgccttcccaattgggcgacggcgaccatccatggattccgttggtcctgtcttctttattatttctattgctctcttgttcattctattgtcctcttgttcattcctattgttaactcataactctctcaccttcaatctctctctacccgcgcttaaactatgtaatagccctggaggtaagataccggaactctggggtagtgatatacaagagcctacaatgtatccaatcagtggcacgctaatcgctccactctaggacgcctaattctataaatgaaatcatccactgcccttaggattgatcgtagtatactttgttaagtatacattacggtgaagtccatgtcgcgggatagtcactagaatattaggcatagatattgtagtggggagcctacctccccactacaatcagtacatatcaccttttcttgttttttttcttttaaatgttgttcaggcgttatgttatataagcgagcattgggatttgaggttactgtcgaagtccaaggtcaatacatggtggagacagggtaattcacccagaatatcatatgacatttggtacctagcatgctatacaaaaatgtatattacagttagtcatcgatgtccgcatagattgttgaaaaagcgggttttgtcatttatgttagagtcatccatatcagtcatttttaccatacattggtcgtaccacagatttctgtcaggttctttaaaggacattttctgccatcaagaaaggcatagttactctttacattccatgggcccggatcggatgaggttttatggttcttacaataaggattgctagaataggcatagtagttttgattctactatggttcgtcctaccctgtcctacctctatcaagtccctaggtctgaatttcttctttcttttctttccttttcatcaatatctctgcctttaacttcagcaaaaactctcacttatcttttacctttactaggccttgacaactcccatgggactagaaaaatttcggtcccagattcttagttaatcactaatttattttcgatcgataatttaaatataggctattctactctaactcccttaaaggctaaggggtcagggaggtatagctatagttatatggtttatctcgtttctaataacccctaggcaggttcgtttttagtctcgttattcttattagattcttcttatactattacgtttatcaagactagctctttaagcttcttaatcctttcctcttatactcttaggtagggtagcggctcgcttatagtggcggctcacttaccgattacgttaactgagcgggtctaatgattatataatagttaggggcgtgttcagttttactcagtaagcaaacagcggcaaggggtgagcactaaaacagaaagggaaagccatgtcgcgaggcctaaaatccggtatatatgtatgtccgctcaagtgaattatacttatattgcccacgcaacggccacaaatgtacatccgatcaatgtagcgtttagtaaggggaatcaactctggcattctataccagcagttgtataaatatagattctttgctattttagttttatagtttgacattgcgtgacgtattcccaaggagcatgcgattgtttaagtgaatcgtacggtgtagatgatgtttcagcatggcttaaagggatcgaatcatatactgtcgtgatatggtgtaagagaaggaactgtctatctagcaaatagaaagaacatttaatgtctaagagatcatagagtgatatcgatgtaaaaggatataagaaaggtgaaaggcggaagatcgtcttatgtaacaaatcctccattcttcactgttcaatttaggctgcttccaatacattattacatatatcccctttccctttctcttcccctgacatcttctgacatcttctgatatccccttgacactttcatcttcctaaaccatgtaaagcctacacaaccatggtgctctcgctgccagttcccggcttctccagatcctccacatcccgccccgccgatggcacgcaatctaaccgaaagtcagcctccggttctgaaaccagctcctcgtccagtcgcaatgcccggaagccatctctaggacagactggctcctctcctcacagctactccatcaccctcgaagcactacgaaataacccttttggcagtacctccagatcccgcggccccgtccagttctcggcccacgaaacagaggaacacaagcgggaacaggaggaactcaatacggcactcgagactctggttcgaatattccctgacgtacagatagaggtattccgcgagctgctgctacgctttgacggacagagccggttacaagtgtgtgtcgaggagctactcaggcataagaagaaatgggtttcggggcggtggaatctcccggaaggaaccacggaagctgaggcagagggaattgctcgcacagtccctggagacgaaaacttccctcgacaagacgttggcaatggcggcctggtcccccccgaggagcggtttcggttcgatgaatacaaggccgctgtgcggatggctatgacaagagaatataatggcctgaataagagtacagtggaggctgtcctcgctgaagtcaacttcagctatgctcgggctcgaccgacgcttcgggatctgtcgcgtcggacatggcgcgcgacattcaacagcatgttcccgtctttcaggcgaaagaaggaccgcgaagaacatccgcttctggtctggcatcgtggtgtagacggggagcttgttcctgttctgaaggagaccgggtgcagcgagctggatgcagagcttcacgagatgttgttagccccgctgttgcgacagaggcgcgaagagcagcatgataaggatttccgatttgcctcagagttgaatgcgaaggaagcgcaagaactcaatgccctttatgaatgcgagtgttgtttcgccgacgtgacatttgaacagattgcgacatgttcaaccaacactcatatcatttgttaccactgcatccaaagaaccgtatacgaagcattatttgggcagggctggggcaagtctgtcgatttagagcgctctactttgaagtgtcttgcgccgttgtccatcgggtcgtgcgagggatgtcttcatccggagatcgtcaagcaggcaattattctcgacacggctggcttcgagacatatcgcaaattcgaggatcggctctcctctgaggcgcttatgaagtctcagctgaagctcgttagatgtccattctgctcctatgccgaaatcgacccagtctaccacccttcgtcccatggtgtccgctggcggttccgtcgtgacggtggcattattcctacgattttgatgacccttcttctcctggatcttatcccattactcgtaatccctgttctcattctgctccttttggacccggccaccgtaacagcggtcttcggaaatgccattcgcaacctctgtctcaagatccgacctaaacgattcacatgtgccaacccctcctgctcacgcaccagctgtatgacatgccagaaatcgtggcgagacccacatgtgtgtcatgagccgttactcctggacttgcgcgctaccgtcgaggctgcccgcaccgccgccgtgaaacgcacctgtccccgctgctgcctctcattcgtcaaatcttcaggctgcaataaactcacctgcgtctgtggttattccatgtgctacttatgccgcaaggcactaggtccacctgtacgaacacccgcgcctgcccgtgccttccgcgggttcgatgccttcgatggcccgggcgatatacccgatgatacctttgacgaacaggtagttggcaacatgtccgaggatgacgaattcgaagaaccagaaggctacaaacacttctgcgagcacttccgcatcaacccagggtcccgctgcaccgaatgtaccaaatgcaatctatatcaagcagaagacgaggaagcggtcgcccgccgcgcaggcgagaaagccgagcgtgaatggcggatcagacaaggtgattccggtgccagcaacccaacttcgacagctgggttccgcaacgtgaatcatgatctctcggcaggggccgatggccactccacgaatggccgcgcgacggcttcaatttgggacttgcagcttacctcttcgactaagccgtgggcttactggctcagtgatgtgtgggctgatggacggtggaaactcgagggtcaggcttttgcggactggattgtggaacgggtcatcgaagttgacgatgtatgatcccgggtctacgttcggctacacctttgagaagattttttttcgccttgctttttatttcgggctgcatcttgcaataatggcgcttggtttattttttgcttttcaacccccggtactctatgcagagtatctggggtgacgtgcagtcaatcttatttgtttggagggtttcagacggtatgatgattgatgacactccctacttctgtttgataattgtgtgacttcttactaccaagatgtagcgaggacccttactttctttttaatgcagatcttgattttgagaccagtgtcttctactcctaattgaataaaggtaagctgtcttctctctcttcgggtttcaatatgtcaagtctttgcttccaattccgagggatttgtaatcaatcttctgccagtataactatcgcatcaaatgtgaagttattcattgtggtatacacaaaatgcttcatcccccaggtatttcaggtatctcaggtgtttcaggtatttcgcatcggatcagagagccgctggtcctctttcagccagccatgcttgatcgccccgtcctccgcaatgtgtcatcgccgtgaggaagctctaaaatcgtcggtcatactcccgacaccagtcgtccaggcctttaggccagtattctggcttttcgatcaggagcaaccaggatggtgcggaggaaaattctaccggggctgccgatagtaaatgggcttgtgctattattagcactgagatcatgcacggcacattatattatttctattgaagtgaaaggaactgaaacaatggtctatatgcttttatcagccaaagtctccatagagtgccccggcttttcgtgagctctcagacgattagacctagctctctcttttttcttcgtccagctctccattgattcgcttttttccttcttccttcaaagcttgatcatcggctcggttcaaaccaacctgtggcatcaacaaagcagccaaaaagaaagcaaatgtcgcaagggatgcaccaacaatgaaaatgatacggaagcccttttgatatgccggtgtcagcactttacggacatgctcagaatcctctgcagataaccttgatagatagctctgtggacttgagagaagagagcgggactgagattcgtcgagattgaggaccgagatggacgacgagacaatattatttctatattggttaacaagagaaccaaaaaaacagaattgaaagaatccttacatgatagttccagcgacggcgagaccgagagtaccgccgaggtttcgtatgaaactgctcacggttagctctataaaatgactgacatcaccatgggtgccactcacttcctgaatgaggttatcacagccatatcccgtctttcgacaccggcttgaacggcaatgagagagctataatgaattagtttaattcatttgactaggataggaagtcacatacggctgaagagtatttccaaccccgacaccagtcaggatgccatacccaatctgctttcccaaccccgaatgctgatcgagtgtcgagaaaagaccaagaccaacagcccagataatccatccaaaacagatgcattcacggtagcgaccgacccagtgtacaacaagaccagaacctgtactgctgatagctgtggatgaagtcagcatagcaacgcaaccaagaagaagaggactcatactttgcatgagggtaatagggagcagcattgcagccgcttttaccgtcgaatatccaaataccagctgatagaaggtgggaatatagtagatttgcaccaaaaagttccacccgttgatgaacatagtcaaacatgcgccattcacaatcctaccctggaagatatgcataggaaccaacggtgtcgaagtacccttccactgccacgcaataaaggcaagagagatggcgaacccaacgaccagagtcgcaataacatgtgctgagttccattcatactcaccaccaccccaagtcaaaccaagcagcaagaccgaagttcccccgagagcaagaagggcaccaaagaaatcaattgccttcagcttaactttccagttgccagtaactttccgaaggggcataaagaaaaaaacagccagcgtagttaatgcagtgagaggtagattcaagcggaagatccatcgccacgagtcttgtgaaatggaggctagtgcacctccaatgatagggccaatgccattggcaatagcaacaacggcacctagaataccttgatatttgcctcgttcacgaagaggaacaacgtcgctgacgatcatttgtgcgactgtcataagaccaccgccaccaactccagtgaaagcacggaagacaatcaattgcgtggctgtctgcgcaagggaagctgccaatgacccgaagaaaaaaatagccaggccgacgaagagcacaagcttgcgagaccagatgtcggatagttttccatatagtagttggaaacatgttgatgttctgtgtcacgagtgttagtatcgtgaatgcaagagaaaaaagactactcacacgaagtaaccgcccgaaatccaggaggtctggtcgctggctcccaattcatttcctatgatagataaactggccgccagcgtcgtctggtccatcaatgccagaagatcaacgctagaacatgccaggaagatctaggggctgtcgttaattgggccagatattgcttgttactgtatctactaaccgtgatgatggtgcgcttaggcacgtaattagtttgttcgttgaaggtgacattagtcccattcttctcaactgcaacagcctctgttgagtttgaattttccagtacccctgtcatggcgtattgatatcatgaagggataggaaagtaaacagcccagatatgcggtagaaagagagaaagcaaaaaagagaagagcccaagcggactaatcaatttcatctattcacattcgtcattcactgattcattgatcagcgtttagtttgagcaccttgacagaagatctgcgcattagagttggcaaaacttctcaaacaccctcaagatacccgcccctttataccatgtacctcggaatacgggaatattttcagctgatagaaactaaaggtgaggacctttgtgatcattgaatcaattctagaggaccttgtcagactatgtgacatgtgagaaatcagattcaagaacatcgcaaggtacgacgtcaagaataccagagcatgacgcagccacagtacgaattattccgttttcaaccattctatatccaattcctgtgacaaagaggcttaccttcatccgtacagagagttggatctacacttgggccgtgtcaatatccccgagatcgctcatgcgatttccttgttcatcattttagcaaatctccaagacttcagcgtccattcatggcatttgaccctcatattagtcgactcagtagtggagtacgagtagatcttactcactacctcttggacgccaaggaagacgcaacaggatggaggggaggggcaaaggatgaacgctgtagaatttattctgtataattgcccagagtgacccgggattttcttcccttatatctgctttcgtcactcgaggagattgtatgctactcgactagtatcagcatctatatctcgcaccaagtgtgtttcaacaatatggtcaattcttccgagaaaataaccaatatgaacgagcacaatgtatacttcggcattgactcgttgaagaagtacttcgatccggactgtcagcctcctttgcctcttgtagagctgccacctcatttgaatccttatcaccaagatggggtacggatatatgccaaaatgatgaccatgcatccgactaacaacgtcaaggcaatgccaggtgagaaattcccgagagaacaccgagcatcaattgcaagctaacacgagaccagcattgaacatgctggaatcaagtgttgtgcccggcgagacgaaccggatcatcgaatacagctccggatcaacagtgatttcgatgtcaatggtcgcccgagtcatgcacggagtaaatgacacccgggccttcctgagcaacaaaaccagcgatgcaaagctgaaactgatgcaattcttcggtctcgacattaccttgttcggtggaccatctcaaccagagccattggacgaaagaggtggcattcaaaatgcccgaagaatggccctggagtcagaaacgattgtcaatcccaatcaatacgaaaacaacaacaactggcagtcccatatccgatggaccggtccgcagatcttcaagcagctgcctgaaataaacgttctctgcgctggtatgggaacatctggtaccatgaccggtctggggacctatttcaaagacgtaaagccatctgtctaccgacttggtgtttgtacagcccctggtgaccgggtacctggtcccagatcatatgctctaatgcgccctgttgagtttccttggagagcagccgtggataccatcgaagaagttggctcggccgaatcctatactctctctctaaacctatgccgagaaggattggtctgtggtccatcatccgggttcaaccttcaaggtctctttcagacgttggcaaagcgcaaggctgcgggaactctatctgagctcgcagggccagatggcacaacccactgcgtcttcctctgctgcgacctaccatatcagtacatcgacgagtacttccaaaagctaggcgaggagcaatttcacccaatccggaacgaggtaaataccccctatatgacgtgttggcgtcttaacgagtcttggaaatagaacaagagttgacctatctactatttaccagcgcctgacaaaagttgacctgcaccgatatgacgagagctgggagcgggatgcgttagatgtcttaccgcagttttatggatcaccgcgatcgcttgcgcaaagcctattgagcgagattgtcctcaagccgcagaatcacgttctggacttgcgccaaaaaaatgatttccacgcgtggcacctccccggatcgatacatctgccattgtctagtgttcgacctcacagcccgtcaccgttctcggatccaggtgttctggaggcacaatgggcggagctagagaagatcttcaatgatgacgtctttgtctcagatctgagacggcatcaaatcctcgtggtatgctacgatggggattcggcacgcgtggctactagcgttcttcgggcgaaaggcctcgaagcagacagcgtgcgtggaggccaccgtgcgctgaggatgtatggaatcgggaatgagagcccgatctccgttgagaaggggcctattaaggccactgtttctgtggcagcggttccccttgaacagagaacctgagacccaggaccgtagcgcaatcgactgggaaaatgcggaatgtagggttggatttgccatgtgaagcgctagtcccgatgcagacatcttgtacctcgtttttcccccttcttttcttattttcttggtcttgttttcaattacttcatcgatttggttcattgtttggcgcatactaccctatgactctttcaatgagaatattgttttgactccttttctacatcttcccacgcgtaagagaccagtgtccaccttgtctctccgcatgcgttgaatagctcgcatttgagagaatcccggaatattcggaagtcatgcaaggacatgcatgatgtatgatatttgacgaggggtgctgacccccacacggtgtcagatgtcagatccaatttatatcaagcgcaaatgtgctctagtccaattagcctgtgatattccaaccaaccacgagtctctgaatgattccaggccccatatctctatgaaatgtgctcaattgtgagcagatcccctcgggtgatcgctgggaataactgaaatgactagaatgttaattcaaaccccctcgacaggtacaaggagaataaaggagatatcccgttttcggttccgccacccaaaaacaaacttgctccagatctgtcgatcataccttatgtattccatgatatctgtatttccttgaccatacattgtaggtattggtatcacttattttcggtcacacaaaatgatggacatgaagatggccgagggcacaccctggctcgatcagccggtgatgcttcattcgtctcgcgccgacaagtgcaagctgaccgagtctcaatgtctctatcgcaactatcactggcgatactggtatgcatgttcttccgagtcacctccatgtatgtgtgcttatcggaaatctgttctaggtaccaagccgaccatgtttacgcattgaacaccgtctacttcatgtgtgcggtgattggggtgttcgcgatctcgaacttgcttgtacgattcgctccagatagagtgaaacggaccagaccatggcgcatgttcacctctgcctcacgatacctttcttatcgtggatatcgattgcctgcgctgcgatattggtctccagcattaggggtggtgattctaggtgctgtaggcgctgtcttcttcttcggtgggtgtcttggacttgcgaggatgtgacggggatggtggttgacttctttatagcgatgacactcggcccgcaaccttattactggccaacagatgcttcttatggaagtagtcctccgattgcgactcgatcgggctggatggctcttgcgctgcttccatttgtactgtgggtgttggattcggagcatacaagtcggttgctgaccttctttagggcactgagcacgaaagctaacatgatctctggcgtgaccggtattccgcatgagaaacttcaagtgtttcaccactggactagctatgcgatgtttgtgttggccttgattcacaccttccctttcatcatatatcatatctggaagggggatatgatgtatcagtggaagacaagtgtcgtttactggacaggggttgctgctctcatctcacagacatatttaaccctcatgtctttgccatttattcggtaggatcacacctacctagcttgactactagaagactaactcttccacagcaatcgattctacgaattcttcaaagccacgcacatcttcgtggcagtggtatttgtcgtgtttttcttccttcactgcgatttccggctctcttcttggtaggttcgactgcaataagccccatgatgacctcgcattaacatatatcagggactacttcatagcctcaggcgtgatctatttcttaagcatcatagccagtcacatccgtacctatctaatgcacggcatccacaacgcgaccatcgaactcgtccctagcggtcttgtccgcgttgcagtcccatcaatcatcaaatggacaccaggccagcacgtattcgtgcgcttcctcacatcagacttacacctactcaccgcccaccccttcaccatctcctccgcatgtcgcaatccagacgaaataggaaaagcctcagaactagtattctacatcaaaatccgcagcggtgtcaccggacgccttggagcaatggcatctaagaatccaggctgcacgaagaagatattaatggagggaccatatggcggcgtcagcgaacctcacatggcgcgattcgacacgattttagtgatagccggcggctcgggaggcgtgttttcactagccatggtagacgaagcactccggctgacggggataaacgcaccggcaggcgagaaacaagcactgtcccgccggaacctccaagtcgtctactcgacgcgcgaccacgctatggtagactggtacatcgatgagatcaaatcacggctgtctgagtcggacatgttatccgcgcagtcggacaacggattcgagactgcggtatctgtgcacataactgacccgcagggattgggaatttcttctgcttcggaatctgacgatgttaagagcacgtttggtaaggtgccgccggctgagattaccactgcggggagtttcagtttgaatgttcaccgcaatgctcggcctgatattcctagtttggttgcgcgcactgttgccatggcacatgttcaagggacacatcttcagaagaagcagcgggttgggattttggtttgtggtcctgcttctatgctacatgatactcggaatgcggcggctttggcgcaggccagggtgtttgggggtgagattgaggagttgtatttgcattccgagcctttcgtgtaagtctttggtttccttgctatattatgactattggctaactggtttctacaggtggtgagtgctatttgatacagagtagcatctgctggattgatcttactctttctcttctcttctaccagtttatttattgcttccaattacatacgtttccatctaagacctatgatttgctgcaaccaaaaagaatcgcataattatctcagaaaaggagcaatatccaaagaaatccaatttattaacggccaagaccctctaaaccagtctagagcccgagtctatataaatcctaggttaatacacggaaatgtgagtatgaactaaatagtacagaaagatataagaacaatcaccggccagatataaaacaaagtctggggatatgaaacaccggggccaaagcccaaaagaacaaagacgccgaacattgatcccataaggctgagtggagagacgagaaaaaacgtgagaccaaagatcaaccaagaaatgcaaatctaaacattaaacaaaatcaaaacgaagagatcgtcaggtcattaacccatcaaatcctaccttccacgcttgtcacaaggatgaacatattttcttcctctttggatccttgagatccaatcaatgccaaatcactctcctctctcgattcttctcatcaacgaatccctcatccgcacattgaccacaccaccaacaccgtatgcaggaacaatcttgcccatgcgcgcaaaacaactaggcacataatcgcgacgaattcgcgccaaacggtctgtccagtgcaggccaccggccggctgtcggttatacagatccaaaccgaggaggtgcatgggtgtactagcgaactgcatagcagcggggcaggcaaattgcgcgatgctggatttcattgttgggcttgaagcgaggaagtctgggaccgaaggggcgatgagggcggggatattgaaagaagcccagattgtgatgctgtcgcggagacagaacagggcataggagacttttggtatttggaggtttggtgctatgggtgcagagggagcgcatggtgcgcgcagagcggagctgtacttctgcgcgactggatttgtatttacggtgacgtttgattcggagggaggagaggcgccgaacattttggcgaagcgcgcatctttgtagacgcagattgtcatgttgactatcgttgttgcgaagaacttggggaggcctgtgtcaataacgttatagggctgatggtgtgttgttgatcggagggtgtcgattgcgtttgctgtgaggtaagtcgaggtgtacagggtgtagatgaggatgaatggagtgctgaagaagaagccgcaaggtcgagcgaccatcgatcggagcccattgttgatcgtttggcggattgggaagcctttcgaagccttttccataattgcactagaggaattagtcttcttttcggtaatagcacctaagaactatcgtaagtcacttaccgatcaatgatggtgatcaatggacaggtcagcgcaccggctgttgctgcactagcgacatcgacaccgattcgcttgcccaggtccttggtattccatgttgaagctgtggagcgtttgcttggtgcctgtccttgacattcctgaccctgttcctttactgtggccattgtaaatattgtatcttgtacaacagcatcccgattcgtgctcatgtagtatagacgagaaacaagttatgcattgagtaaaactgtacacatgataaggtcaaatgagacaaaatgaattacgaataagatctgggggaagatttatatctatcgttgatctcccccagtttcggacgacaatgaaccggccgcggtccggcgccgaccctccgatgccggcctagcttgtcggctaaacgctgttccgttttatacaggcaggtgtgtgtatatcattgtttttgtgtacattgccaagatagatacaatgaactataggtttgcttcattatactctgactctcattttaaaatcacccaacgccatataccaagatcttaactacatatctagcgagctacaataccatccatagtgacatggaccgctccagcttgaaccaactgagataaaggttagcagaaattcgacttatgcaagggacacacataatacataccgctcgttgcaagtcatcaatcaggtcatccacatcctcaataccaacacacaaccggatcaagtcttcagggaaagcgcgctccgcccgtgtcttcgcatcaatgctggcatgactcatacggcacggcatactgatcagactgttgacacagccaaagctgacactgatagcccagatcttggcgctctccacaatgcgctcgctaatggccgtgtcaccggtctcgaacgagagcacagcaccggcgccccgcgccatggacttgtggagttcatattgcgggtgggaccgcagaccggggtagcgcaccttgaagccaagggactcaaggaactcggcaatgcgctgcgcattgctctgctgttgttccatgcggaccttcaacgtcttcacgccacgcagcagcagccaagagtcgaacggcgacaagccacatcctgatgcgttgatagggaagtataggcgttctccgagctgcaggtcgttcacggcaatgacaccggccatcaggtcgtggtggccggagaggtatttggtaccactctcgtagactacatcggcaccgaagtctagtgggtttaaaagaaggggagacatcatagtgttgtccacagagacaatgcaggctgggttggcttcgtgcgcggcggtagcaatttttccgatatcgacgatcttgatcagcgggtttgtgggtgtctcgagcagcaccatggttgtcttcgagctcaggacctcctggaccttctcaacctgtgtggtatcgacgtggtgcacgatgattccaccgttggtcgagaggaacttaagcagacggttggtgccgccgtagaggtcgtcaccagtgaccacctcgtcaccgggacggagaagtcttgtgatcacgtccaaggctgccataccggaggtcaccaccagggcgcgccgtgccgacatgatcttggccaagtgacgctcaagatgtgtgcgagtggggttgccggaccgtgtatagtcatactctccaccgccggcgttggaggtttgtttgaaggtagcactctatgtgataataatcagcatttatgtccaattggaagtaatattctatcaccgggtgtggatatgtacctgatagataggaacgctgctggcattgtattggtcactgccctcggtgaagaccagttcggtggcaatattgtaccggcgaccggtatgagggctggacggggcaggggaaggtggaaggtcattgcctgacaggtcaacctgagggaaacccttctttacaccgctggatgaccccgaggcggcattgggaattccggatcctgacgccgacatcgttgtagcggggcagaaagacgggagagagagtgtgtgtgtatatggagggtaattgaggtgaattgaaagcaaacaagactcaaaagatgcgaatatgccgaaagagaaagggggaataggaacaaaaatcaaaaagaaaccgaagaaaccccaagcagttcacatcttctctccccccggaccaagctgactcgtccacgtcggcgctgattcgtcgagccacggccattgcgatctcgtcatccgctagtcccgattaggcatgcaggtatgtggagtttttatgagtcaaacaatctacgttgattaactaactagttcacgaagtttgttagttatgtccatggtgattatggaagagttgtacatagattgagagaggcaatgcccaatgtgaaaatggagactttaatatcaatgttagtatagcttagctagacatctcaaggcttgcttaaatttattttgatggtttccatactgctagcgaagagatatatcaatcgaaattcaattggaagctatgtacggatatatgactattatgactagccaactactctggacatactctcgttagtcatcgacttggcttgcccaggtgcccagatgggacttcccacttttctcctcatctctacatatatctatccacttgcacatgcctctactgagtctggtgtctggaatctgaaaattattcaagcctcttcaataccgtagagaggaacaacaaaaatggcatcggcatcggaagcggcattcgcctatcacgaaccgtcaatcaaaacagtcctcagctataccagctttctcttgactctgaatatagccaatacctgtctggacaagcttctctactgtggttttttcggccaactcttcatcggtgtcctgtggggcacacttggggcacaatggatcgatcaagagacagaaagagtgatccagcagattgggtatttaggcctgatactcttgatttacgaaggtaagtgtgtgacattttgtcaacttgctggatatatctacttacaataaataggcgggttgtcaacctccatccagtctttgaaggcaaatattctactttcaactgccgttgccatcactggggtctgtgtcccaatgggcttttcattcattcttgaggagcttgcttgtgtcggccacccctcttcagtccttcgctgctggtgcagccttgagcgcaactagtctcggcaccacctttaccattctctcaaccacgcagctgacaactacaaggctcggcacagtcaccactagtgccgcaatgctagacgatgtcgtcggtctagtcatggttcaaattatttcaaaccttggcggaagtgccacctcattcactactgtgactgttattcgacctgttcttatttttatcgggttcgccgttggtcttctattgctgtgtgcattctgtttacagccagtattaaagaattgcttggttgcaaagacaagttccctgattttatgggaactacagaatttgctttcctttcacagacgtgtgtgctagttggcatcgtggctggtgcaacatatgctgggacttcgagcctctttgctgcctaccttgctggagtgattgtctcttggttcgatgggctgatagctgaagcgaaaacacaatttcccgccttgcggtctgctgaatctcacgggaaaactttgaacgaacaatcgcgcacacggaattgcaaggatcgtactgaagagacaccctcttcgcctacgcaacctccacaggcaaccgaaataacccctaatgatacacctacaggtgaactcatatacgccaaatactacaaagagccggtgaaccgaatccttctccctcttttcttcgtgggtacttccctttgatttaggaaggggcatactaacactagtaggcatccatcgggttcgcaatccccataaccaaaatgttctcaggccaagttgtatggcgtggaattatttaagccatgctaatggcaattagaagaatgatctggctggtgcgattctctccgagccctgtgtcgcgtctggtctctatcatcaagaagccatctacatacgcccatttctactgtttaggtccttggactgccagcagaaaatcaaaccaaaagaagaaaggcccacaaataccagcgactcaagatgagagcgcagatgttcccgccccggataatgccaaagacgagtctcagtcaacgaacagatcccctgcgcccacttttcgccccgattcccgtatctcgctccccccgaaaccaaagtccttctacccgccttctatcctgggattggcaatggttgcccgaggcgaagtgggatacctcattgcttcaattgccgaaagcaaagggatattctccaatgactcttccgaaggaccatctgatatctatctagtggtcatctgggcaatctccctctgcacattgatcggtccgatcttggttggaactctagtcaaacgtgtaaagaagctgcaacagtcaagggtgaatatggggctcgatcctttgggagtttggggaatctaattatctcggatacagtgagcgacgaccatgctatattgaagcccacaagcgataccattggtttaatgacaataatcattctgatatgaatggtatcatgctaatctccaaaaacacagccgttcagccacccatctccataatccctccattcttgatatgagccatgtcgcttcgggtaatgggatccttcttgtcaaaagacacctttttgcgttccgcaggagtccaagacgtgatgtccttcgaatcaccacccagatgcccatcattggccttcttcagcttcgctaatacctttgcccagccccagggatcattggcattggctgtggcctcgggaagctcaaccgtctcatcagacgacttttcgtagcgcgggtggttcaagccatgaattgtgacatcgtgcttagcagcataagcctcaatcttcgcgccatggtcgccttggtcgataccgtactctttgaaatcaacactgaagcgaatgaacagaccgatcatggctccgatgttctttacctccgagtccggcttgaagagcccatttcgctccagagtagcaagcatagtaaggaacattgtaccgaaggcgataaacaccgcattcacggtctctccgtcatcgcagctatttattgcacccgttagcgttccgtcgacacctaatattctgctcggagccagtgagacaaacccaaccatcggcatgatagcatccgtttggaaatacagccccgtcgcttcacagatggcccactgcatcttccagtcaccagctgcctcgtcaaaatctaggagcaggttctccaccaactccataactgcatatccaaggaagtcattgtagacatacatcccgaagttatccgggtcgcgtgcgatggtaccttgctgcagcgtaatccatttagcgatgccggcgtttgtgaagatccatttctctctcgggtgctccgaagcaggttcgagggctgtggctttgtccgcctcctggtatcagaatcagccactatcccgcactagagaatggtatttctctcctaattaggaagtcactaaccgcatcatctttcttcttctgctctataagctcctcatcttcctcgtcctcatcctcagactcatcgtctgtgctttccgtcttccaaggcgcgcgccccagacaaatataggagaaagccttgactgggtctcgggttcgcaatttgaactctgaagccgcgtttcgggagacagagacgggggcccatcgcttattcagttcgcgctcggtttccatgtctacttcagagctgtttgctaggctcttggacttttttggaccactagcggcggactcggttgattttctcttgggaggcataatggaagatgatgaaattgaaacaacggcatagatagaaggtatatcaagttctaaattgtgataggttgagtgggcttatttaggtaaatacgggtgacgcgacttgacgcgtcgtggacacgatcacaatgagagttgacacctcaatttggtagaataatatatttgtacaggtatgtgaacacaaagaacataatgaacacaagcaattgaaatctgtatatactccaactccctctggatgccagtccatgaagtttcccgaatatgatccggatcacagaacaacaacaaacgtaagaaaataacgaaaagtcccaagatgtcactatgaacctcgtccaaggaaattcataaaccagaccgtcataaagacagaatagtcgagagaatcccacaacgccgcagccgaatccaaaccattttgagacagaaaaaaaaaaggaaagctccaaaagatgacagtatataccagcataacaattagattagagtctgcgaagggagcccggttatcctttgtactcgaaagcccccaaagtccactctcgacaggtaaagtgtgtgtaacagcatagaaacgaagcaaacatactccgtgattgtttacgccgccagatcgccaaaaccgccgttgatgccgaagaattggaacctgtcgcgtgttagcaaaagaatatcattaagaaaaaccatagaatcgaaagttcttgggatacttaccagtcctcgacatttagcgttgttggcgcagtcggcccgctacgggaactactactccaattatcattgtcctggctagcagcgtccattgcagatccactcatagtgccatcgagactgtgcataggcggccaggcttgctgatgctggccctccatgccgaacatctgctgcggcgggttgggatgcattcccatcgcgcccggcagtcccgacattatcggcgggctaccatgggagatagacatgctacggcccgagacgggctgcggctggttgttcaccatgggactagggcgcggggccatgccagggggcatttgggatgggatctggagggatgggtcgactgcggtgggctggggtggcgatgtcaattccgggaagaaggcggtgccatctgggaagagttggtcgggctggaagttctcccagagtgagggggagaggttaggagaggtgcgggttactaggaagaagtcggggggtgtggcgggtagagaaaattggccgttgaatggggttgtgggcctggtgttggctcgggaattacccgtgccggtcatgggatcgtgaggaacgcggtgggtgtttggtgattgttggccgccgggaggaggttggtttatttcccgggagggagtgacagccggtgtctggggccgggagcgctcatatgacacggggggtgtaggcccgccaccatttggcatgccgatatccatgtcatcaaatttgcgcttcggcggatcctgcctcttcgaggaagatgattccccgtgtcgcgtccgctgatgtctccggcctgcagccttctgaagtcgctcttccattactttgtttccgaggatagactcgaatagcgtattcaccatctttgccaccagccagacctttgacacatccttgagggctaacatgcaaacattgattctttcctggcaggtggccacgatcgaaggaaccgaggagcgcatttggtatacgtgcatgatcaaggctgagaacagactgtagacaatgaaggcgggcgtgtaccggatttccccatgagcctgtaggttctcaacgatggaggtaatcatgcctgcagcttggaaggcaattgttcgcgatggataagccatttcttcgaccctgtagttgttgggtgcggacgaggcaggcggcatgtgagccctgtgaagaagacagagtgtagtatagtaattagagtgcaagagagccgcccagaaatgatgccgagagcgttgccagcatacttctttgggacagttctgcagccaatcggcgagggccatatccgagtgggtgagatccattgcattcattcgccgtgactttgaagccacagagtactgctgcgacagaaccaagcccatgatctcgcatagcttgacatactgtaggaagaactggacatggacagggtctgctgggtattcggcgacaatgtcgagctcatcctcgatgaaatcatcttccgtcaccatctcaacatccgagtcatctgtattgattccaatcggccgtcccagtgcgacagcgacagaccgatcccgggtgaacagggtccaccatattctcttccagagtcttttgtctggtttgttaagctgggacatttcgacgctgcggtgcattccagagccctgtgctaccaccatagcgacccgtgtccagtagaagacgttcttcgtaacgtctatgactagtcagaaaatccatcaggatagactagtataaattatgaactcaccttccggtccctcccagtaccaacccaaaagtactaatgcctgcacgatggtgacacggtcatcctcgtagttagcatcatacagcgccttggcgcgtttataaaaggtcatagccgcaggggttgtcgagccattcgcatccataagctgctggttagtacagactctcgatcctgccagcagaatcgcctgcagtagtagcaacgacggcgggtttttggggtcacggtagtgacgcatgaagcgactcttgttgataatcggcacgacgggggccacccatttgaagtaggcgtcgaccaactcatcacacagtggtttaggtgggagcaggaatgccccacgctggtgcagaatatcgatttccaagttgtccaggtccgtcaatcgagcgcgggatcctctgatattaggtggaagcgggtagtgcacgacatctgcagttccatggcggtcttgaaccagaagagacagatttgacgactcgcccaagtacgccacccggccggcctcttttatcggagcacgggcaaacttcggcttcatgaattgggcataggcgttattggcggaagcttgttgggcagcctcagcctcggaaagggaagtattgggcatgccgtcgacgcccatgatgttgtttcggtacccaaaggcattgctcttctcatccaagtccgaacttttctccttttctctggatatagagaccgagccagataccgaattggctggctcctcagtgacagtgggtcggaagtgagaaactgcagcgtcgacgaccgaggcagtttgtggtggactgtcctcatactgactatcttccttgctcttattctgattgttcttctttcgtttcggagacgggatcttgcactcgatagagaaagcgacacaattggtgcaaggcaccccgagactggctgcatcacatcgaacctgcgtgacgggaatggttagagagtgggaaaaggggcgtgaccgagggcaaacccaccttgcgagcatgacatgtctaattgaatcgaaaagagaaacatcagctacaatttttcaaatccaagaaggggagagagaatgtatcgcgataagaaactgagccgaggtgcgttgaggacctcggccccagagtcgcgtctcgctagaaatctagacgtacctcgcacgcgcgtgatgcacgttgtctaagattagatagaacgaattagcaagcgcatcaaaatgcttaatttgaagaatctcccttcaggtacaggggaagcgaaacgccgaagaaaaccctgtccctcatcttgctttgcgcccgcacactccccccgcgacaatttatcagaccagaacaccgtgtcaccaatatcacaatagaactaaatggcaccgacggcacagacagcaaaaagagccggcttaccttctgaaactcaacggttggccttgtggaccattgcgcaccgtaatgcccgaagtccccgtcgagcccgcgttgctcggagccgggctggtatggctgtccgatagctggtcggtatgaaattcagtggtactcatggccacacagtctctccatccaggaattcagacttggtcgagtcggagaattggggggatgcgctcggaggagaaggggaagtgatctgatataagtcgaaccaggcgcacgggagtacggggtacggagtataaaaaggataggaaatagaatcttgaacacagcaaagacgccacgcgatcaagaaaacagaacagaaaatcagcaaataagaaaaaagtaccgggagagggggaggaggagagaggaatatcaaagttggggtgaagttggttgtggcaatatcaatttcctggtggagttcccatttggtcagcatttatgtttatgcattggatttacactggtttttatattcttatgttacatgtatattatatccttataatatgaagtacggagtactatatatattattcccttctatttcctactctctgcgttatctaagtaaaagatgaaaaggggtcaaggtaaccctaagaaccctgtactaagtccatatggcgcaggggttcacaccgaaccctcattaactcaacgatatggtggaatgcttctttgtgggagacaggaccactctacaagacattctatctattggcaagcccgggaggagtataataatctacatataggtgaagtatataactcttgaagtgagttcccccaatccctcaattgcgaatactttcaaggcatcccagacgctaactaaacaggaccctaattaggcccactgtgtggaaataccattgcttcagcctcccttcgggcttggggggattgtcccgactgaaagattggtttttcggtcttcggccatgacttgaaagaccccagatctctgcattagccccacgcctccaatgccgagtaaaatgaccacggtcagagcctaccgccacgcgggaggatgcggaggtatggaggggagttgacgcggtatactctcatgtcgggaattctgctcaggactgagctcggagacaatattcagtcatgggccatattggcgggatgtgcggatatatatgcagtgtgacctattgctgccctctggccaccgcttaaagtatacttgtataggggctttccagactatactacgtaaatttgggaattctcattatagcatgcgcgagtgttctgtttcagacatattaatcgagaaaggtactccgtagtgtgtagttgtaggtgtagatcattacagccgatggactcaaactgaacgatatcaaagtcaaaacggtgagattgcggggaggaaggtaaagatggggacgaaaatgacctggggagaagttgcgggggaaactccatcgcgtcgtgagctactccgtacgtactccgtgaatcaatgtaggtttttcagaggacttgacagaggacttgatggacgcatatgagcccacctgggcaagcttgtgatgcctcggcaacttttgagcttcgaccaatgagagtgcccagttggtctatttccattgaattgatgccccactctctgtcgctagaggatacatcatcatcatacatgtaaaaaggacggtctcaggcaccaagtcttttctttactaggcccattcgccggagatccccgggaagaaacggttatgtcatggacaatatttcgcggattgggagtaaatggaagtccgtcggtgagaaaaacagtttattgttgcaaagtgatatacatatcagtcaaatcttcatagagtaggtagggtctttgaactagtgccttttatagtcaggcggaccataaaataatatacatggaaaagaccaattagatatgaatataaccagccctatgcaagtgatatcgtgtgcgcagaggggtccctagttgcatattccaactatgaccacccattctttcctgatttacccttgcccttgcccttgcccttgaatttggactgtttggccccattagattggggtttcttaggctctttgtggtcctcgtggccacactctgtgatttcttcgatagtgtggattacggcatccccaacagctgtcgtgggggcgaagtccacaccgctgacaaattgctcactgaggaactccagaccggccacgaaggtgcagagggcgcttgcaatgcagaaatggctaatggtcatgccgatgtcaagccaggagccctcgtcgcgtaccatgaagaagaagttgagggtcatgatgtccgagatggccatgacaaccatgaagagcgcgctagggggtacctctaaacggcggttaaggatacccagattggcacttataatagcgaaggggatgaggatttggagaatcaagagcgcgccttgggcgaaggggtcgaagacggggataaggcgacgaacgctgtcgagggagaaggtcgagatcgaggccacattgccagtgctgaagaaggccgattgtaggaggaaaaagaagaagagtgccacgcggacatcagagagagtaagggcacggtagtagaaagtttcaccgttgacggtcgtcacgccagggttgttagctttcttcaaggcacctgtcgtgtggacataaatggcatgttccaggcgaacccatgtcacaatggtcatgcagaatacaaagtagaacagcccttcccacgagattgtgagaatgataaatgttggtgagaaggttaagaagatgatcatgagccgatgcagatagtggctattcggatacaaacggtggaagaatggaagcgtgagggaagtcactgaggttcggttagcttttctcggcgaagacatctcatgatcctagaacacactgctgtgtaaacttacctagcacaacccatccaacaacgatatttccgaaaggcaggccttggcgggcctggagagaaagcacagatgatctagtgactatgacggcaagaagaaccatgccaagctgaattcccatgatgatccgcgagccaacacgaccaatagcatttggttctttggattctgtgtcacgatgtccgaggatagcatcctcaaacagcaaatataagataccagtgaggaacatgagtaaaccgccatatgtgctgtgaacagattagccacatggaaattgttgccgtagaaagggatctcacattgtatcaaggttttcaaccttgattactggcagaagagtgaacgaactcatcaaaccgcagccaagagaccaagtcgcagacaataacggatggctgcgaataaagctaaagccatggataacaggccacaatgcacccaaggcaaagcaaacggtgaagatttcgcggtggaaatatgattgaaccattgcctccatgaccccgagaaatacaagtagctggagtccaaacttgaggtatccagtgaaggagcgcacatggcccaatacaatctgccgaccggcaatcagagccttgcggcgtgcaaaaacctcttcccagaaatacaccggaaagaatgcatagaagtagtagcgccaggatgagccctggtaaaggaacaccgagaacaaggcgaccaagatagacgagaagaatgagatactcgccgtcgtccgatgtgagtctgatgttccatgcaagacgtgcagatcaataaccgtggttagcgcatacgcaatccaacctaggtatccaatagagacgatagtccgtaagaatagccagtcatatgtttgtaggtagcgcagaccctcgagagcaacgcgaagaagctcggcagacaccacaatagcttcctcgtggtcaccactggagatgagtacctcaattcttgccagtctgccttcaatcgagttctcgtggtagcccgctagaggatcataaggtacataccggatcaccgcgtgtctcttttgctcctctttgacgcggtacatctccagaactgcctgggtgttggcaagagcggctaacgccttttcctccgggctcgcattgaggtagtctagaggcaattgaccaacggagttgacagggaagtcaagaccgactagataggccatgagcgcggcaacatcagcctgcgctacatcgtgtcggcggacctggtcgaatccccaatccgccgagaaaccatcttcgtgacccgctgcgattccgctagtggagagctggggctgtgcgacaccagatccccagacaaccaagggtgtccgcgtgttatcgggatgaccgtcaccatggctgcccgtgtcactcataccatggtctgcggtgaacacgaacgccgttttatcatctccgtagaaatcttctactaactttgtgacggcctggactccttgatccactaccttgatgttgtgtaggtattcgttcgagtaaggccggaaagagtgaccggtggtatccagtccaagcaggtggaggaagaacaccaatttgtcgtcccgtagtttccggtccaattcagggtcggtctttgccgattcgaagagatcatggaccttggagaatacccaagtatcaagatgcgtggcatcgacggtgaagtcctccgcttcttcgctgtacatctccgcatcgaccctccccggcacggcgccctccttgaacattggcaggatatcgggactgccccagctccaagtatgtcggctctggttgaacacgctgtcgaaattcaccgggttcatcttccaccccgtggtgactgaggacacatcctcataaagacctgcgataagcgcaacatggcctggtcgtgattcagtggggacgcgagtgtgcgagacaccgaatgttccgtgtgagaggaccttcgagcggataaacggagacaggcgaatcaactcgttgttttctggatcggcgtcgggggacgggtcagggaaagcttggaatgccttgtcagcccgtaggccgtcggcgacaaagaggacgagacgtttggcaggtgcggaggctccgggtaatcgctcgacaccatatgatcgcatgccactaacaattggactgacgaagtagatgtcaaagattgagtatgtatagatcaggtggaagaccactgcgagggcgagaaacccaacgcggccgagacgtgccatgatctatgcctcctagatattcaagcgttaaaggagtggaagtggtccactgccacaaagaaaggtagaaaaattcacaaaacgagagatatgaaggtcaaacacaacacgtcaaccgtcaacttgagacgcattgaggaacttggcggtgagagccaatcacaggcctccctttgtttactctacatagttacaacgttctgctttagcatgtatttaccggtcgaagctttgcaatatcttcacaaacctggagaaattgtaccttgaaataaatccagtattatgatccagaaagacatgtggtgctggtaaagtgggtgtgaggatttatacctccctcaagtggctcggagataaaaaaaagggatgttgtagtaagaaaatagtatctcgccgaggaaatctaaattcaacccgaatctcaacagactagtctatggaattatacgcttgagaatatgagtagcattgaggcgagaacttgaggtgccctgcaattgatgtgttgaaggagaaccttgcgaaacgtgtttcaccgggcgcaccgacagacgattaaagatacatacaaggtaggcatacaagcgccaagtgtgtagcaaccttggaaggtgaatttgttgacattaatgctattaaggatggaacaccatgacattcccagccccgaaatgaatagattcctagagaaacaccaacgattgacatgtactatcagtactgctattgcgctggaagagaccgccgctttgtgagggcatcaatgactcgcgtataaaacttggctgcttgtccgcggacgaaagtgatgtctacggtcaaaaagtctggtagcaggttgaccaggtcgcgatcgcggttagcgtctaggtgaggcaggtattggaactcggttttgtcgtaatcagtcgagacctttggtacgactagatggaagtgaagagctgtagggaggttagaaaaatgcgcacaattcctaggaaatctagcaacttacttccattgactccagtctggagacaatcgtataggtaatctaactctctgttcttgacatcacgaatgatcaatcctgttaaatcgctgtatagatcttcttttaattgagcgagctgtgaagcctgcgccgcttcggcggtggcagctgcattggcacgattggcggggccgcccttgatggcactgccggggacctttgcagccccctcgagactggcagctgtgttccgcgctgcggcgagcttggtctgcaaggctttgacttcagactgggcagacgcaagctgtgcttgggcctcatcggcgccagatttgagtcgagccaattcaacatcacggtctttgagttgcttctggagtccacgggtttgaagtcctagctttcgctgaacatccaattcagccttgagcgaagcaaccaattcattcgatgctaatgatgtatcagttcatctggcctagtagctataagacaacagaagagcatacctttagtaacggtctcactctgctttcgcagtttctccatgttggtgttggcttcgacaattccaatctcacgtagattgcggtatttaatctccaaggcatcatgcttcttggtcagttcgcctagccggcgcctcagctctgggtctccaccttgctcggcgtcggtgcctccaagcttgcgtttacgaggagaagaatcttgtgagttgcgtgacatggatagccgagagcgagcgttcttcacgggggacattgatttgcgattatatgccggttccttgtgaatggcagtctcatctccaagctccgttgcgggttggtcattctgttgagaatcttcgacttcgggttcctttccatcccggctcgttgcacgagcgagagggctgggctcttgctctgtgtgagtttcctgaaaactaatatttcgagaaccgctcggggtaaactcgaattcaccatctgttaggagctgtgtgctgaccgcacgaggtcgtcctcgactgcgtgctggggcagctctcgcggcctcgaccggctgcttctttgtattccttgagacaagtgagtctccatcctcctgtttgtcttcatcttcctgttctggtaccatattctccgcctcagttgcctgcacaggcgtttcagcgtcttgcgctgcacctctgggtcgtcctcggcgggcgggctttttgtttgtagggggttctggttcggctatagctatagctccttgctgctttcttgttcgagtagcaggtttgctagttttggtctcggtcatattctcgtttgaggtacgcggtctgcctcttcgttttttggcgggaggctcgtgggtttctttaatttctgcggcttcgacttgcatgatgtcctcatcatctgagcctaacaggccagagagtttggggggagctttccgtttgggcattgtgcagctaatcttggaagtataatcattgtttgatgacaataattgcatactcgcgggacgcgcaccgacaacaacacccaacaccgccttctctacccgacatgtgactggcatccccccgggtcccgcgccacaagctgccccaatgattccggcgactcggctgtcttgtcttactcctggtggacttcaatttacttttactgctctttaattttttgtttccacttagagattcttatttgcgccattattgcgctatatttgatcattcccttaccgtcatggcttcagctggccgaagatggcagcagttattccaagaaatggtgatggttgcaggcactgtgagaaagttcctgtttcagataggacagaatgcttctgacactattatagtctgcctctgcatatttcctcattcgataccttctatcacgtcttgatttcgacccagagagccagaagaaggaggaacaacgacagaagtccgctgctattatacgtcgattggagggtgggaatgaatcagatgatgagactccacggaagggtggtagacgggggaaggggcaacgaaagaaggagcttaccttgaaccaatacgaacaagcgattgcgatggatgttgttgcgccggaggatattccagtgtcgtttgaagatatcgggggacttgatgaaattatcgaggaattgaaggaatcggtcatttatccactgacgatgcctcatctttacgcttccacgtcgtctttgttgaccgcaccttccggggtcctcctatacggcccgcctggctgcggaaagaccatgcttgccaaagctctagcatcagagagtggagcatgtttcatcaacttgcatatttctacattgacagagaagtggtacggcgactccaataaattggtcaatgcagtgttctctcttgcgcgcaagttacaacctgccatcgtcttcattgatgagattgacgccgttcttggaacccggcggagtggggagcatgaggcaagtggtatggtgaaggcagaattcatgactcattgggacggtcttacatcggcaaattcaacgggagagccccagcggattgttgttctaggagcgaccaaccgcattcaagacattgatgaggccattctccgaagaatgcccaagaagttccccgtgacccttcctccaatttcccagcgccttcgcattctcggtctgattctcaaagacacgaaagttgatcgcgataatttcgatctgcactatctggtcaagactatggccggtatgtctggtagcgatatcaaggaagcatgccgagacgcagcgatggttcccgtgcgggagcttattcgaacaaaaaaggccagcgggatgcaaatggatgcaatggatccccaagaagttcgtggtcttcgcacggaggatttcttctctcgcgccggtggtatcaaggtcattcctcagcctgctccattatccactccgactggcaaagtctccgagaaggaggatggagactggagtactgcgtctgaggccacatcagaagctgagactcgacactctgtgatggctgagccgccagagtaaatgcgaggtacttttggtcgccttttgatatttattctccctttatctcgcagcgcgaagacttggcgttaatctactggaaatgctaggctctgaattggtgaatggccattttgctctagtatggccgacttgttgatagaatttctgatgtcatatgtacaatgggtttggatacaacaatctaatacaaatcttgctctttaactgtgttcttgttctattcacaatctatatacatgtacgtatgggggccgacaaagtaccgggtacacataataggtggccttgaccggggaaggtcatgtactgctacgaaatatgccacgaacttgcgacgtagtagcttcagcattctctctagggctttgtattatgtactccgtctgtacaggccaagacaattctattcaattcttctagttcttataattctcgtgggcaattgtcctgctttaaattactccgcgttcaaaaggtgcgggtcgttatcgtcacacctccttggcctcctagttatcgcctgttctccttcacctcactctcttgtttcccataccttcccaaagcttttgtgttgttggaactctttactttgtattttggacgaatacctggatatatgatcaaacgttctctgccgtgctcccagtcaaaggccacgaatgcaagtccgggggtggatgacgaatgggtctctcctagatcaactctgatggcaactggtgccttggcgatacacacttctaagggggcttttattttgcatccttagacttattcgctggattcacaggaatgagttctcaaaatagctttgccaatgcttccccaagcttcaacatgctcagcgcaagcacaacttcaacctcgacggttcgatcgcgccctcgccgcttagtttcattcacggacgacgaagacgacagcaacaatgctacaaactacgcctacgaggatgatgcccagctatttccctcgggattatcaacgactcttgcgccctccgagggtggaacgactcgatcccgcggagggaccccctcgccattgtcatcccgtggagcctcaccacttccaatgagacacccatcacgtgcgaccgaaacgataaatcgtagtagtcgcagtgggccaacatcgttcgcttggagtgggtcatcaaaggcctcgtcgtcgggaggtgctgcgaactttctggactcctcgtggtcctctctccaaagcctcgcatcttcagtattggggagtgatgctgaacaagttactccgaataatgcgacaaaaccacacgcgcgaaggaagccatctcggtctgacgtatatattaagagtgcttccaggtcgacgtggggtccgtcggcaccgacggctccgcagttcggaactgggacaaaggaagagcgacaggctttagttcaggccaaaaagagagaagcgctgctccttgctgatagtgatccgatcgcaagtcgtacgctccctcacaaaagacgcgactctggggacatttcatatcaagcgtttgagccggagcacgatgaagacgctctagcctatatccacaaagtgcaaccaacggacactatcaccggcgtgacgatcaaatacggctgccaggctgcagtgtttcggaaggcgaacggtttctggcccaacgacaacattcagagcagaaatactgttctcctaccagtcgatgcgtgctctctgaaaggccggcctgttcccccaaagcctgtagatcttttgaatgacgaagaccccagggacagctcgataaccccgacggctgcctctgccgatgatacctctgcaaccgcgtcaggggccgatggaaatcatgtttggaagcatgaatcgtgggtgcacatggatgggtttcccggaccagtcgaaattggccgcgttcctcgaagagcattgggattctttccgcgtacgcgtcgaaaatctatatcttactcggatgcagaacctcccgatttttaccgagaaacaatcactcctccgtctcctaccggatcaccacctctaccttcatcatttggtatactgccacgaagtcgaccaaacggcgaccaaccccaacccaaaaccacacaccccattcgtcctcagcatcgccgccaacgcagtagtatccaactgtctggcacaggggtgggaacacttgaccccacctcgactggtccagggcctgcgttagatgggttcactcgattcttcgcgcagcatataccgaatctcgcgcctccacaattcccggacaattttcggacgtcttcctttgactccacatccaccgtcgcatccaatgcatcgactagtctcgagaacattggcggggcttttgaaggatgggttcgaaaggtagcaacacgcgctaaggccggcattaatgagcttcagcaaggagcaaccacccagcagggtagcagcaggggtcgcaatatgtggcggatggatgacctgattgagcttgacgacggcttagtggatggtcggaactcccccagcccgttcaaaagtgcatcgcggaggtctgagttacagggcacctcatcctcatcctcgtctaatcaatataacagcccttcggtggcagcgagcaggtctcgtgcgactggatttggctctggctccggttcgtccgcctatggcgagcgggtcaaggatgattaacgtgtttgaatttcacagcgtacataataagagtctccctgtgtatccttcggagttcaagatttttgcatttcttttccttcatgcgcacccccaagcggcttggtgcttttgttcccactttggcgttgccatttttcaatgccacgtcacaccaatatttgacatcgaaacatcgcatgcatgagaagtgtggacatgaagaatctcagccgctatttcgtcacttgcatacagcccattgacccagttgatattcgcccaatgtctcaaccaggttgttgcgtgacggattttgggtgttgatttggactggacagaagcatgctccttgtcatttcttctggcatgttggatgtatagtaccttcaacgctcttgttgctactgcagcgcttttttctttatcacacctggcttccagcctaatgcctcatcatctagaacaccatcttcgaaatagactactcgctttgtatttgggcttatttttctcttcttttgccgtagcattaggggaacttctgtaaaagcacagctaaattccgaactggaaaagatcagtcgctttccccccttatgcccggtatttcctcttaattttcccacctatgagcacgcatggcaaagatcacagctcattccgacacgttgatggtggaatttctttagttgtgatacgatttccgggaaagagattgtctaattctccatggcctggatttgagaatctactttgcagccaagttggcactgaacaagctctataaaaaaccccttcaactcttgtccggtcagtttgagctcctctcgaacttcgaaaatgcggtcgatgacaagagcctcgacggtcctttcgaccttattcctctgtataatttccggaacaatagccaactctctctcatccaaaacaacgggtaacacagcgaataccccaacagcaaccctatcaataagcaatcaaagcctaaagaccatcttcgtgggccgctctcttccggaattcaaccaagatctttttctgggcatcaagtatgccgacgagccaatacgcttcacaccagtcgagctcaagagcgactatgcatcgaaggataatgactctggacattataatctatcaccagaagaagtcgtcagcgctacttctaacctggtatactacaatgctatggagtacggctacgactgtcccgcgtatggatccgataccaccgacatggtcaacagtggtctcatcactttgaacgaggactgctttaacttaaatattatccgacctaatgccgacgagagtaacggattgcttccagttgtgatctggattttcggtggtgggtgggcacagggcgctactgcggatccgaggtatgttggtcgaggaatatagggctgggtacgaatgttcataccttagaaaggtggccgatggctgtggttaaccttatgctacgctgcctatagatataatatgagctatatcgttgaacagagcgcattgaacggcaagccagttctgggtgtttctatcaactaccgtctggcagcattcggattccttgactcggaggaagtaagggtagtgccaatatatagaaacttggatactgaggattcttgagattaacttggactccaggtcgaaggaaacaccaatctagcactgcgtgaccagcgcacggcgatgcgctgggtgaagaagaatatcaaagcgttcggcggtgatccgagcaagatcactatttggggcgagtctgcgtgagtcactggaaatattttggtataacagatgcttaattttgaataaacagtggtgcatatagtgttggagctcatctggtgaccaacaatggcgataacgagggtctttttagagctggtatagtccactgtacttcgtgccattttacgacaccagactaaggttcgcctagcaatcatggattctggaaatgctgtcgggcccccatacaacggaacagaatggcaccagccaatgtacgaccgaatcgtcgagagagccgggtgagtctatatcaaacaagtctctatcaaatgacgctgaatatactatatctagatgcaccaattcattgaataccctacaatgtctccgtgagctgccatacgcagctttatacagcattgcaaacgagggtctagaatggtttgctactgtcgacggctcattcataacccagtatccgcaaatcaactacagagaaggcacattagctcaagtgcctatcttgttagggacaaataccgatgaaggtaccagttttgggacgactggcacaaacaccgttgaggactgcatcaatgaattgactagtacgtgttgtgtatagcatttttaagtcacatcgtgctaagcgagtagcacagcatccaagcgttggatcctcaaccgtccccaagctacccagctgctgtcctactaccccaacgtccccgccattggctgcccctatggctggggaaataccacctggccctcgctgggactcatgtacaagcgctatgcatccatagccggggatgtgaccatggtagcgccacggcgcatgttagcccatcgaatggccagcttgcacgaggatgtatattcgtacagatgggatgtggcagcgttaaatggctcaacaacgattggggtgcaacatttcgcagaggtatgtagtaacccacctagtcttagatacaacctacctagctctctggtctgcaagatagactgacgcttgtatcggttatacagatccctttcgtctttgcaaatccagtgcaggccatcacaccgctagggtccgaccctgagcgcttgaaactggcccaaatggcagcgcggatgtggacatcattcgtggcagacttagatcccaatggacatggtggttagtagaacacacgtgcggctagaatctattgtttggcatctgacttcttctttctagtgccggatattgccaaatggcccaagtattcgtcccgagcgacgaactttgttttccgcttaccccgaaatgagtgttatgtcgaggctgacatataccgcgtcgatgggattgattatatcaacagcatcgcgcggtaatgtgggggtgaaggcaagctaggctagatcatctacgttgtgtgcatgaacaagggaaacagatggcagacatgtgttagtccaattgactttcttcgtcaggtaacgagtcaaatcaattgacagcaaagagaccaggcgttgattttgttatccaagtagcctgccgaccctatgagacgagcaggaatgatcaatgtggttctttttctcgtttggtaattgcacatcttatatctagccgaaaattcggaaacatcggttgatttaaacactcttagtgccgacgttgaggagctcgacctcgctgtgagcagttagtttcagttgtctcttataccttcgcagcaggactgagaaaagagatgagttactcacaagacaagcttagagttggcggggatcaggccggggaagccactaagatgattgaatatcagcacaactctcatagagagaaccaaaggtgcatgttggagttgtgagggattggaagcatccgcaaaaatgatggattgttgattcagcattgaggttggttggttggtacgtaccggtcgccatagccgaagtcactgtcgagaatcgaatattagcagtgttcagtagatccgcgcaaaagtgcaaaggaaagagaaatggcaactcacgggctgatggtcaggatggccttctcgccgagggacatctggggaacaccctcgtcccagcctaattattaggttagcaagctgaagaaatctatatttctgacacgagactcagtcggggtatattgaaacgcaccgcggatgagacggccgacaccgatgggggtggcaaggggcccacggccgggcttgtgggaggtatcgaagctgagggtatattagcgcgtgaggcacctggaggtggtatggagatttggcttacaggctgcccatgaagtggttatcggccttctcggggtcatacaagcagccggtgtagtggatggcaacgtgctcgcccttcttagggtagtcaacaccgttgccctcgaccagagtcttcttttcgacgcccattgtgaatgtaatagagatatatgtaggatgaatatgggagttgtgaagagaagaaacaaaacaggaagacggggaaagctcgggaggggcagattatccacttttttcctgggcgggggacgtacggagtggaactccaagtgtctttaagacgaacaacatggttgctttactgcttaatttattggctagcattcagatcatagactgggtatccatatatttactcaatggcaacttctggtgattttcagcaatagaataccccgaaaactcttttggaactgggatgtattcctgacacggttgcttggaaacagctggaatcagctgggaatagctgggaatagctcgaatgtaacaccagggcgaaaactacaacacatagggatatgatctgcgcaagacgggcaaattcgtgggttttgcgagtgccaccgatgaaatctccctcaatgtcatgatctacgacaggttcagaccagcccttctcttggactagagaaaggatcatcctatttgttccctcgatgccccgcggaggggtaatggcggggggaacatctccgcgataaccccggggctgnnnnnnnnnnnnnnnnnnnnnnnnnnnnnnnnnnnnnnnnnnnnnnnnnnnnnnnnnnnnnnnnnnnnnnnnnnnnnnnnnnnnnnnnnnnnnnnnnnnnnnnnnnnnnnnnnnnnnnnnnnnnnnnnnnnnnnnnnnnnnnnnnnnnnnnnnnnnnnnnnnnnnnnnnnnnncggcgataaccccggagctgttctataggtatgagagtagaaatatcaaggcaagatcccattaatatacagcatagattgtaacatcatgaccaaaatgccatcttcttcacgtcctccactgaaatttccacaattcgcgtcttagggaaccgaggatcgggcacaggagatgtcactgatgcttccaactgtagataatgcagtgttgagatcccagtgcgatccacaaaatcaagcacggggcggaagttcaaagcaacctggtcgacgccgtggctgtcatcggataaacagaagcgacccttacgcgccaaaaattcctaaaatgatcaaattagtcaaagatatacaacaaagaactgcgttggttaccttgcagatctccgctttgggatacggttctgtcattcccttgcgcaacgcagctgaattgagctccagcataccgccgtacgaggcaataaagtccaagtttcgtaaaattttactccagacaccaggccaggtagtaaagctgcgctccatatcatcgctcttcagacgaatcaagtcaaaatggcccacaacaagcggtttgagttgctccagcatatccagctgtgcatcgaagtagtcctcgaatagtcgctcatccgttccgccggctttctctcgagcctgctcgtacataggtcggtcatagtcgatcggtacggtatgcatgtggtgaaccgagccaatgaagaattcaaagggaaatcgtgaaagtgagcgttcgatcaaatctttagaggcgggtcggatccagtcaatctcgaagccgatgatgattttgatctgggaggcatatttctcgcggagaaagactgcttccttccagtaagcggcctcatttgctgcatggctttcttctgtttctccagattcgaactggatgattggttaattcaagttttgcagtgtatgtgttccttacgcacttcctcgggataaaaatcttctttgtgacggggcatatgttcagtcagacaaaagacttgcatcttcttgctgatggcagtttgaatcacatcttccaaggagttttgggcatgaccagggcagaattggcccgaatggctgtgatgcgagaacggcatgttttatggatatgtcactgtttgtggttagcacaatattcgaagtaaataccgagttggagggcaggaataggcttagctgaattgaactgtgaacaaattctatactcacatctgccttttaggacgttcgaagaagatcaaatatgccggttacgtgggggagtcagacatctattgatagacgataaggatttcgccgcacgggtgttttatagcgcggagtaagaagtaacaattgtatgaatgcattattgattcatagatcgatactggataattcagtatacaatttcttgatcggtccttggatctaagcttttcacatttgatttctttaatataccccaatgagatgttacttccagccaccatctacccagacatcgctgaccacaagggtgcgaaacacgatcgtaccggacgccaatgatgaggtcaccgagtgaagcgcactgtcgttcaactgtcgttcaagttgtggacatgcttgaccggtacgactcaattgcaagcattgagccagaccaatcgaacccaatagcaaatcaggtcaaagccttgacttcctctaaacccgctctctagaacagtgtccccagtagctccccagtagttgcacactcgaaccatgatatcatgggtaccaggcaatgactgcttgccgtcctattcacagccttaagagaccgagtgaaccagccacaagagttgcgatgggattcaaccctaaagcagagtctaataaaccgaacaattcatccagcagccaaaacagtagcaacgacgtacgccccatcatgcgagatcgataacttcgcaaccctcccctcacccgtatccccatccagcgcattcccaagataaacaatctcaggtctccgacttacatcctcgccaaacctccctccatcctcctgaacccggaccatgacatccttccagccaatcgaagccgcaccggacggcgccgcttttcgcgccgcctcttttgccgcgaagcgtcccgccagccagcgtgttatgtccgccggcacaggtgcaggctgttgatggtatgcggcgcgtgctttgaggacttcgctgaagcgcgtgtgaaagtcgtgctgttcttggtcgcagagaatgcggcgcgtgaatcgtgggagatagttgggtcgggtgaggaggcgggttattcgtgggatgtggacgatgtctgtgccgatgttcaggggaaatgggaagggaaggggtttcattttggggtttctggttgttggtgggcgttcttgggggagttgttgtgggagtgaagtggtaggtaggaaggttgcgggaggtgttggacacctcggaatagccgttgagcttttttttttttagttgattggagtacttgtgcttaactcattaggaaattattgatcgtgtatgaatttcgcgtgtgaccattagcgtggtttcagagcatgcttgttctatgctgtttacctctacatgttctcgtttcgctttacagtccctcattgctaaagcactcccattgaccggataagcaagctaatcggagccataaagagcaatcaatactcatgccaaggtgaaagtccacagagggctcttgccaagcaccgactccgagcgacccggtgtgagattgcgtcaaagcaatcgtaccactcatctttcttcttccgcgattgatcttgctcactggcaggggaagaacaggtctgaaaagccagtgtcaagaggatatttttctatgcagcgtacacgcctcctatgtacagatcaatcaacctcatccgccgacatcccaagatcggtccgtgtagctcctcgaaaaaaccgtggtcacaaaaaaaagctccggaagggcggataaacatcggtgcgcgctagaactggcacaacttcggaggcagtttgattgaatacaaatcatagctcctcatgttcgaccgctccatcaatataagccgtatcgaggattagtttaatggccagcggcgggcttcttctcgccgccatcaatctccttcatgaagttcctgtgagatatgaagttagcaagacgctcggggctgatataagatccaattcatggtcggtagttctctgttctcggcgacggtgttggacatactggacgaagttctcctcatccttggaggaggcgttgatggggggaccctgagcggtcttgggcttttcaccaccggacacggcaagccaggaaccggcgaagatgctgccgagggtggccatggcgagctaatgagggggtggaggaaacccggtcaacttccatgtttcacaaggatccgcacgaagcgcgatggaaaagggatggcgagcacgcagcggcgttttgggagatagagaaacttacgacgtgggagccgaccttcttgccagcgatctggtagtagacaaccattttgtagggttggaattgaggtacagcgagaggttcaattggcagcgatgtggacggaatcctcaggcttgcaccaaacgacgaggtcggcacggataccgcctttcctaatatggttagacagttcacatgacttcggaacagtggatgattaggtaaggacactcggccacccggccgcatccgatatcatgtgaccttcccgaagcgaaacatcaacagtgcattggcacatgaagatcaatcacaacacgagaacaccaaaaaggctggtttgaactcgatgaaaggaagaaaccgataagctaaagctcggactcaaaacgtttgacgacgaagaacaaataatgagttcggcgccgacatcatcccgaggtcccgtattccaaggttacttctacatatcccgatccggaggataccaacggtacctcggaaggaaactaccacagctgatgctatatgtcggctatggctggctgtcttcggctgtagtatgcggttaatatgagaatctttcaataataactcgtttcatcccttgcacagctttccctcattcttctcctttattgtctacatattatatacccccttcacgtattggcacgcgaataagcgttgcttgactacataaaccatcaccgatcatctatactacatccacaatggtctggggcggtcgtcaaccagatggatcccagtctcccccgcaggagttgttggataagcctatagtccgagagaagctcccccccaaattgcagcagttggttgatcgggaagacgacttctatgatgacctctactccccatagtatgtgaagctctgatgattttgtgtttttttcttttttcttttcttttttggtccaagcaagttacagttgctgtcgctgtcgctgtcgctgtcgtgtgttcggagatatggaagggagatagagcctgaaaaataaggccggtgtacttccttaccaccccgcaaactcatctctagcaaatcagcgcaacgccgaaagcaagcaaagacaaaacagaaactaacgatgggcacctcggttgacgacagctcggtcgattccacagacacggggtatcgctatgccgcgtacgccaaccgcatccgcacgatcctcctgtccgcccatcggtatgtcgcctacacttcagacatcggcgagtccttccgtccaattgcacacccatggctcgtgcgctctgcctacactatctcctggacatacctgctaggcgatgttggccacgagggctacaaggcctatctccggaactggagggcactggctcccaccggtgaggcatacaaagatgctagccagccttcgaataatcagattatcaagggcatggcgacgggcaacatgacgattggaaaatcagccgtgtctaaggatgagctttcaaactggtcgacccccgagatcccgcttgcggaggactaccgcatggtcatggtcaagcgcgcggtatttcagagtatcgcgagtatgggattgcccgcattcacaatccacagtgtggtccgctactctgggcagatggtgaagggtgttaagaatgcatttattcgtacctggacgccgatcggggtatgtaccccgggcgaacaggcaaatcagtgaatatgatgctaacgactgtctcttatagcttggtctcgctgttgtccccttccttccctatatcttcgatcatcccgtcgacgaggccgttgaatgggccttccgtactggtcttcgtgcttacggtggcgaagcagccgtccgcccactaccaggcaagagccttcctccccgggaagaggaggaacaccgcgctgttgcggcagcaaatatctcctgggacgagtacaagactgagcgggaccgcgcgcgtgagctgcgtcgccagtcaagtgagcaggccgtcagtggtggaatttcgtcgctgacgagctggttcggaaaatccgaatcggagtcggataagaagaagaaggaatgaggtaaatacactacattgttttcatcatttgaccgaagtgcttcctttggctgcttctgtctcttgtgtatgagcgcatctctctacttattgtacacatcatttcccacactctctcatcttctatattactgatatccactggggttagttgtacacttacactcaacctttctgaacaaattgtgattctgtgattcttcattttctgtacatattccttactcatctatctcgaaggtaatgaatgccgaccattttccaattttcatggttttagatcctcaatatcgaatacctgggactcaaattctgcgtgggacagtgttcaatgaacctggtcgggtcatggcagagatcatgctgataattcatatgtgacggtaaacccagctacaaacatcaattgaccataccgaacttgatagcgtccattggcctcgatttgagagtcggaatcgaaccgcgaagatcggaactcatcaataactgtccgggggtgtctagaggtctaaatacccgtggaacgttggtcctacctagacagagtcgggttagtgcctagagaacccatggttccgaatggagaacctggggtagacccacctttttagcttggaaggcacaactttctttttgcttttttgctcttttaattttatatcgttattatcgtcgtagcaacgcccgccactggattctgtgttctttctaccagtagcatatatttctataaagccagcaagtgaaatatgagcattcacacatcatttgccacctcaaagccctccacgcgaaccgacttggtctgatactgtacaatcaaacgagccagcttcaagcgatcttctctaccaagcctctgaaccctctgacaggggttctttacaatcaatccatcgtagtcgtgctggaattccacatcagcctcccattcatatagcgggctccgctctctaaagtaataaggccggtcatgcttcataacgacctcgtacagtttgcgaaattcttgagatcttccggtcttgatatctccatttggcagtaccaccacacttgcatgccacggcatatcaccaaataggtcgccttgccgcaataggggaatagagatcttgtttcgtcccaatgaagggtgaatcgagagacggatgtattttccaagtgtggcgttaatgacggcttcatatgcctgaaaaatcagtgagccagggaagtcagactttaagaacaactaaaacacaaagtatcccaagcaaaactccaagtgaaacttacgatgagtcggttgatcatggttttcgccatcttagacacctcagccgcgtagagtgccggatcggccgcgataagaggatcaaaccctttggcccattttaaatcctctgatatgcgactgaaatagctgttgtatgtggtcttggtatctgaatttgccttcaactcatggtcaatgtcgaatctcggatcgaagtatgtcggtgacatcagtttctccctgcaggtggggacgagacgcaggtaatctgccttggtaactctctcgccatctcctaaccccagcaagttcatcagccggatgaactgtatagaagaaaaatgcttctctttggcgattttgcgcagctcaatgccatagtcgtaatattcgtcgtcgggaacgccgaccaaatctacaccgtcagtttattttatcactgctggattgatataacaaatggcataccattatatactggtccgtcacaaatgaggataagtcgtgcgccgtaagggtagacctttgaaatctcctcgcacaagtgattcaacttcgctagacccatttcttctcctagatcagccccatctcctagtactttgtcttgatttgggctcttccatggaaatgcaggtaagaccatggttatcggctggtctgcggtgatgttcatcttcagcttgtcaggcacagagtcaaacacccttccgacgtctctctgatggccatcttcgctcgaatgcaagcaaaaccgctttagtacctcgacagcctttagaggcacttcatctggagcatattcgaatctcattgtaaatgaaatgccgaggaattgatggatgggtgcagcaaaatgggggggggggggggttttcgggtgttttnnnnnnnnnnnnnnnnnnnnnnnnnnnnnnnnnnnnnnnnnnnnnnnnnnnnnnnnnnnnnnnnnnnnnnnnnnnnnnnnnnnnnnnnnnnnnnnnnnnnnnnnnnnnnnnnnnnnnnnnnnnnnnnnnnnnnnnnnnnnnnnnnnnnnnnnnnnnnnnnnnngagggaggcggggggggggggggggttttcggatgttattgttatccctccgtgtcaagatcagcatctgattattgcagtgacatatagcttacagtattttatcagttacctgcacactatataggtattcttacatgtagtagtacccgtaatcggtaaaactagaacatagtatttgccaatttctgcagggagcaggtacatcgactgcacaatgtacgtagcacctaggagtcacattttagaattcacctctcctcctcccattttctttaatttatttttctctctaaagccttcctaaacaatatgggccagcgaaacataccacagagcagtgcggccggaatatgctcgacgaccgctggttcgtcctacacaacgtcggccactacctataccgaagagtccccgatatttgttcaacaagatcctcgccaacaagatgaataccgcaaagctgagaacaatgagatccccaatgggggtctcgtagcctggacccaggttctgactggacatctggttgtgttcaatgtatggggctacattacatcgtaagggagccccgtcacataagatattaattcaaaccattgacgcaatctaggtacggtttcttccaagaatactatgtcaaaactctcgatgtcagcccagcaaatgcatcttggatcggagcggtgcagatgttcttagtccatttcctggccactttctcaggccgagcgatggacgcaggctacctgagacaatgcatcacccttggatgtttcttccaggttgccggggcattggcgacctcattcggcacaaggttatggcatttttggttagcgcaaggcgttgtcagtggaattggccacggactcgtcttcagccccatgatctcgctgtatgcgacatacttcaactccaagcgagtgatggccgtctcgctggcatcttgtggggcagcgactggggggatggttttcccagtggtcgcgtataagtgtctcaacaatatcggcttcgcatggactgtccggattatggcagccattatcctattcaacagcattataattatcaagtttaccagagctcggattatacctcggagtcctcctccctgggttgatttcagtgcattccgtgaacgcccttacctccttttttcgatcggctcattcctgatcttcgagggtatttactttgcctacatttatgtaagttctgtcttgtttctcacattggttggcggcataatagctaacatacctaacaacatctacagctcagacaatatgcccaggcccatacaggtttcaccgcatctgactcacttctccttttaatcctgatgaacggcgttggtgttgcgtctcgaattgcatccgcatttgtggcagaccggtggctgggtgcggtaaggacttgcattgcagtctccatcccttgcggtatcgccattctagggtggattggtgtacacacccgcgttggcatgttcatctgggctacagtctatgggttactggttaattgtgcgcagagtcaattgcccgctgccaatgcatactttggatccaaagacccggaaaaatcaggcacacgtgttgggatgatcaccacgatcaatagcattccactactgactggaccgtacatagcagggcagctgatcgcgttacggggaggcgattacctgtacgcgcagttgttcggcggtatttgtatcttgactggagcgttgtttgtagtcggttctcacctttcggaagcttgaaattactatccatgcatgattgtatttgaacagagagttatgccgtgtatctacttgtctaagttactccgaggatgacgattatcaagctctgaatgaggtattatatctaagccacataacacagttttattgtttagcgtgttactaccctatctttacggtgctcgtataaacataaacataagcataaaagtgaaagtgaaagtgaatgcatgtccccctttgcaaattgcctcaactgaccttgaaacatccgagtcaacgaaaagtgtgacccgctctgtttcggaatgacctccctcccatcacgttttctccaacccctctcctcacgggccttctcctccaccaacggagcattacacaaaatggcactcaggcctcttcattaccaccttccattgttcccagggttccagctgctggacgtggcggccccactggacattctcaacattcgaacgcaataccctgacacatcagccatcaccctgactatatcagcggaaactctcgacccagtctcagtgaaaccaatcccacctcctaaggcaaaatggcgatttgacctgcccgtctcaaacatcaatacagcttgtaaccagcaaatgctaccacaatgtacatttgctgacgtgatatctgccctgaaagcggggaaagttgccgatgatggcagtggtgaattcaaacctatcgacgtgttgatcattccaggtggcccggggacacgtctggaccgtatttacgacactgatactacattcaacgaagctaaagtctccaacacgcaagaggttcgggactttctgacagctgttgcgccctatgtccgtcacagcatcataactgtttgcaccggcagtcatgtcctttcgcagactaggcttctagatggactccaggtaacaacaaattcagcccgctacgatgatatcgctaaacaaacgggcggcgtgaactggcagcgcaacaaacggtggctgcgtgatagtgtgtccaaggatgcggtgtctgatggcttgttgttgcctgggattgagatctggtcatctgccggaatcactgcggggattgatgtaatgctggagtttatttcagcgcattatggtggtatcgcagtcggagtagagactgcgaaacggatggagtatcgctgggagcgagagaaggaagcttcttacttcctgtaacgggttccccaaaaggttatcaaagttacagatgggctcaacctttcacgagccaggcttcagacgtaatactcgatgcgaatggcgaatgttccctggggatggaggtcttggcagaatatagtcagccgtgaagctagagcaattttaaacatacaacatgccatccctcaaaactccagtactttgtgtcactggtatacactataatttgtcagagagcagcgggtatttgatcggtcagtctatcttcgcgcgcccttctagagacatcctggacctttttggctttgtgatgtatttctctagccgtcaaaacaatgaaacattatatcgacatgttacatttaccccggaatcttttgccataccattgattggttctcctctatcccgatcccttgtgtaagatatacctaaatgtagcctgatgcctattcgggaaaccgcttgccagatcatgcatgagcagtcagctcaacaggtatcgacttctttggctgggagagcatcttcaaatagtcaaatagtaacggcacgtcctgtgatacggcgtatccacgggcagtatccaaatgcctaatctggatgtatggaaacagtcctacttcaaagtcatgtactagtttcagcatacaagtaatcagatggtaatcaataccactatatcctgtgcaatagcatggtttttattgaataacccaccgaagtaaagttatcagaagtacaagaataacgaggaagagggaagggggaggaaggaggcggcaaatggagttttaacggcgaataaacatggaggctatgagcataaggaaccaagagcaaagttgcaatagaaagccaccagattccaatacaagttaccagggtaccacccctataaatcacgagtacattcgaataccaaatctaccccttcccaatccctagctgccattgactttcccgctctcatctaccatgagctacatcaaaatgctagcgacaacggtagtcaaagtatctccccacttagacataattcctttcgactgtatcacccccgtcccaaagaaacgagcctcattcctccccaaaccacaaccagtcgcttcaaagccagaaaccaccaccgacactcatctcgacccaccggcagtatgttccaccttagcccgcctaaaggcagaggaaataatgaacatcgtggagcgctacggctcccatgagcgcacaaccacagccggagaatggctgggccggtcatcgtttacgccgcgtgtccagacacatgttgcagccaacagggcaattcctatggttctacctgcttttccgatgaagagcaataaccgcatggacaaggtgctaggttcacttccagatttgggggatgagcttgggttagcgcggttagtgaatctttgtcgggatatcaaggctgtttacccgcctggtgcagttgtggttatggttacggatgggatctgctataatggtgcggggttgaacccttctattgatttggatgtcagatacaggatcggacgctaatatgatttttggattctagatcttacggggatttctgatgaggaggtctgggaatatgggaatcgactgcggaagatcgccgttgagaagggatatgcttgcattcagttccatcgtattatgaatatgctgggtctttacactagcgcccatatttcaaaatcggattatgtgaagctctgtggtttatccagggctgaactccatcgacggtgtgggcggccgggttttgatgtcgataagtttttgaaaaatgatgaggattatctcaggacttataatggtaagtgtgtggctttcaagtcgagctaatatctcccagctgattcaatgcaggatatgacaagttcatgaaagtcgatctaaaattcagcccagtgactaaagattgcgccggtcctaaacaatataagaggaggatcaagattatcgcaaaagccatgattgtccgcggagtggtaagtcttctcgagagcgccatataaagcgacaaggtggctaatctctaggttgcaggaatacgcggagttagtacgtcaagtttaccccgactcactgcgtctctccattcatccctcatcggggcagacaaagctctcctgtccccttattccgcagaagaactcattttccatgagcccttggcactgtagtgtggcagtgacaaccacaggggaattcataacagctcaccaatccgtacatcggcagaagttcgaccttattagaaaagatggacaaccatatttcttccgtgagagctcgttgctttttaattgggacgccagagttgattttgagcatcattatgggcaaaaattggttgttaaggcacaaaaacagattgatcaagaactatctgactcggatttggacaaattggcacttttggcaattcaacaaagaagtgtgtcttttgtctttgtatatatctgatattttgaaggaaaattcatgttcaattgctcgtgaaggtccttgaatattgttatataatctaacgatgtaacagccatggtagatcgatatctatagccgacttttaaagggttattatcgttcttaactagttagttagcccagtgacagatagcactggtaccagtatgaaagctctcgttatagcgaattacccgaaagacctcaggccactgaagggcgcgctcaaccattgcacccttgcaactgcctgtgatttcgctcttgaaggctgtgagcctccgtatctcaaagaccaggtaatagcactatttcctggcaagcagcccagatgcaacgagctggctagctgctagaggcagggactggtcaccggcgtggtcgacaaagaagtagccgaccaagcactggcggagcctcaagaagacaacgtgcatcccctggtggagaggcttatggagcgtaatatgctagtatgtataatgagcccccagctgatacaatcaatgtatgccatggcgctgagtctatgtagtaatgagttgttggaaggactaagagtcctaaatcgaacatagcaagtctacactataatttacttcgataagacaggtttagaaaaaatgagatatactcgtcacattgacgggctcacgtccacatctacaaggccatacggcacctggcacatttcatacatctgtacagaaacgcagaaacgcacgaacaaaaagcttaagataaaacacagcgagacagggagtaatggaaggagagggaggtaaggagagatagggaataagcgtagggaaaaaaagccattagctgtcaaaaaggtaccacccagatccattattaatgtgcaagtccaaagactgaatgaccaatagttcataagagagagctttcaagtggaagccaaaagtagtgaaaagatttcgtcccaaatttggttgtcccagtgccattgaaagggataaaaaaatatttggtaaacaaaagggggaatatgtcaggaaagaaaaaaatggataacgcgacacatgcagcgacgaccgatcgtcgctcggagtatcatgttgagaagaaaagtggccggtcaaaaattgcacagaaagaagagatacgtgatatgtgacatgtaaatccttggcggatgatagacaatgaaaatgaagatttgtgcagtctctctgtccaaacctctcttggagagtgggggagagcatgagcgcattgaaaggagcagttatctcagaagaaataagggtcctcgagggcccagtgccctctgattgtcatcgtgggtccaaaaggaggtgggatatgatggaaggagcggtttatacgtcgtattgtcaaaagcatatctagttccatcccaaagaattctctgccataacgggagcactgatcatctgtgaacgagcagtgccacggctaccttggctgggggcgcgaccaccggaagcaaacatcgaaccagcggcggagcctccctggctcatctgctcagcggtagagctggagcgctggtgcagctgctttctcttgcggtagcggcgggcaacccagaacatacccgcaccgtaagcggcagcaccggccacaacaccaactccgattcccacggagctagccttagccttggagcttccggcagagccatcggtattgtcgctagtgccactgtccgtgccgtcatcgctgccgccattcttgatactgccagtcgagtcgctttcgccactggggtagtttccagagaactcgaggggaattgtggggtcaaccattgacatcaatgactggatggattcactagcttgggtgtagagagcagaattggggttaactttaagcgctttcagggcatcgaccttatcccgagggaaatagaagatagcaatggtggcgttatatcccgtggactgccagttatagtaaggctcaatagcaaacataacagggctgtcctgagcagagaggtttggcaaagcgttctctatagcctggggggtatagttgaagatctgcgacgacgacaagggtgtagttgcaacaaatgaccagggcagctgactgttgaaaccaagctggagcagaatagagtcagacggagcctcggtgacttcattcgacggggtgatagagccagggagcgatggtggtgccgtgggcttcgcagtctcgccggaggtcgagctctccgtggcggtgacggtaggcacaataagaatagtcgatggcatccagtcattgtcgttggaggtggaggtggaagtggaagtggaggtagagagcgtaggcatctctgtcgtctgagactccacggtggtcttagccgtgctcgcttcttcgctcgtcgtcgaagacgacacgggaagaggaatgtaggctgagtgagaggtgggggtgggggtggaaaccttggagctctcgtaagaggcactacccggaacagaggcggcggtggtagtagtacctaagaaaggagcccagatactagaaccagagacagttgcggattcagaagtagaggtagaatcagatccgggcgactgtgggacaggaaccgatcccagggtcttggtcggggtggggatggcaccagtgttggtacctccctggccaggaatgagagcagtcgacttggacggcagaagactaccatttggaatagacgcagtcggaatcaaagcagtgctaccagtgccagtagaggtgacaccaaggacggaatccacgcttgacacgagactgccgacgagatcaccaggagttgtagttccagtgggggtgggggtggctaacggtgagctagtagcaaacgcaggcacgctgactggaatggtaggcgaactatacgggtcggaggacacagtagcacttgtgctgttaccggtggaagacttgtcacccaaacccaaaagggcagaaagatccgaccccgagcttgccatgcttgaggctgcactgctgatcttgttggcgctagaagatccagtgggtgtcgcagacacggaggttgttgattcgccgagaatgccgcccaatcccgaggttaggtcaccaaggacactgtcgctggaggatgcaaaaggagtagaagaagcagacgaagttaccttagctgataagtcggagacgggggtagtcaaggatgtggaaccacctccgacgaggttgcccacattcgaggtcaaatcacttaggagaccgccgctagatgtagcagtagcagaagaaataggcgaagtgaccacagctgatgagccggaggcgggggccgcagtcgaggagatagaatcaactccgaggatactgcccacattcgaggtcaaattactcaggagaccgtcgctagatgatgtggtagcagcagcagcagcagtagaagtaggcgaagttaccacagccgatgagccggaggtggggatcgcagtcgaggatacagcactactgcctaggaggttacccacattcgaggtcaaatcactcaagagactgtcgctagatgatgtggtagcagcagcagcagtagaagtagccgaagttaccacagccgatgagccggaggcgggaatcgaagtcgaggatatgaccgcactcgaggatgtggaagtactaccgagaaggttacccacatccgaggtcaaatcactgaggataccaccgctagaggatgcagtagcagtagtagaagcagacgaaggtaccacagcagatgagtcggagaccggggtcgtagtcgaggatatgaccgcactcgaggatgtggaagtactaccgagaaggttacccacatccgaggtcaaatcactaaggataccaccgctagatgatgtagcagcagcagcggcagcagtagaagtaaccgaaggaactacagccggtgagtcggagaccggggtcgtagtcgaggatgtagtcgaggacgtagtggcagcagcagcagcagaagtaggcgaagataccagagccgatgagaccggggtcgtagtcggggagatagaatcaaccccgagtatactgcccacattcgaggtcaagtcaccaaggataccatcgctagaggtcgtggccgaaggagacgtagtagcggcctcggctgatgagtcgaccaccgatccctgctggctcgtggctcccgcatcggtagatgcggcctcggagttctgcgtactcgtgttctcggtgctcgaaccctctgtctgctgcgtagtcgtggtagtggtgctagtcggttcacctccaatagtcgtagtaccagtgatacgatgggtgatctcggggttcttggggtcgatcgagatggtcacaataaccacttcctgtccctgctggggctgaacggcagccgaggattcgggggtggtttcgggggtgggcgtagccgtggatgaagaaacttgggtaggaatcacgttgtcgaagacggcatcgaagattgagccaggttcgggctcagcgtttctgcgaatagttcgcttgacttcctgcgggaagtaccaacggggtcgctgaacgtgggcttcgggggcatcttgagctgcgacgagctcaagaccgcctacagcgaggaaggctgcgagaacggagatggcgtcgggacgcatgttggacaattctgtacgtgatcgctcagagcgggtccaaggtcagtgtacaaaaatgcgataaccaccgtctgtcaacacctcatgaatgatcagggagtgtgaccaggaggtagagtgcctggagtattcgagtttccaacacaaccaagccccgggcaattgcgataaattcacaatgtcaagattattcagagtatacaacgtctcgatggcaaccgatgagaccgaattggcgcaaacaataactcgacgataaacgaatggaaagggggatttcgatcaatctgaaacgacccccagaaggcgaaaaaaacgagtgtgggcttagaaaagctgtaaggagtgaacgacgactttctgtagaaccgtccgggcaacgaggtcaaagaaagtgaaaacagaaaatgcgggtgaccgatgcaaggggagagtagcccaggtcaacgcgaacacagcaaaagcagacaagggagagaaataaaggagtgaatgagtgaatgaagttgatcagagaagaagaggatcacttcatcattaggggggggaaaggtggaatgggggggcgggacacgttgtggtagcgtcaacaagggtaatttacggtaaattacaacttttagtgtatttaacgagctggtccgggcgtttggcaggtgcgtgggatgtggccacgcacttgcccctgagtgtagttcttagatattgaacttgatcctattccaacaatgtagtaagtacgttgtatgtttaatagataagctggtctgattatggacatctattgttgtaacaacatatttatacctatttataacccatttggaacctctgaagtcaaacatattccaagaccctcatatgaaaccatactaaacactaacctgccgatatcagccatttaggtacggagtcgtctagtcagtatttcgtaaataacggcaatgatggcccacgccatgcagaaaaccgaaatgaataatgaatgctcatgggggaagaatgagtctgttccctataggtccacgaccgctttgctttgtatatagtacaagtatatctgagccctcttcggcatttacagtatagagactgatgtacaggtactccgtactcggacgatatttcccttttcttctcttttgccgttacgccgttcacccgtgcaacaataatatataccattggaatataatccggctattgcgaatatcgatcgacaatcaaaaagcatgataagatggtaaatcaacagatatgactcgagcgtacccaactcaacccatacaagattgcacatataccttatgtctgtcagatatgaagtatagagtagacacataaaatccgaagaatgagactattttcgcgcaatgtaatacaatgatgacagcacttaatttcgaatcaaacccccccgaaaaaaaaacataaagtccgtgttaggatctgaaagcgtttttcatttgaggcgatcaatagccccggagaccattgacgaaaaaaatgccgaattgagtcggggctaaacccacctaagccgcggatcacaatataaaagaaggaaaaagtgagaaaaaggcgccaaggccaaagacaattccgagcaaagttcagtccgtcgcaggtctagccccggaggcgtcaactaagtgggcccttcccacacacgtacctgagcgtggagggaatccgctcaagtgcgtggccccaattacacgttaccaccattagttgtggctcaagctcgccagtcttacacacctacccccttctggcttaaacccatcaaagaaatctcgtgtagccgccgttaagaagtacggagtacggagtacatacggagtaagagagctgtccgatgaacgagccacaagttggtccttccatttccaagtctcgtgagacatatataattgtcgtacttggctagcttgcgagttatacaactatgctgtgcaacaccactagtactagttcaatccactatggaagtaggggatgagccctgactcaaaattgggttattagaacgagggtatattaagaaatgtttcacactatatcgatggttaaggttttatctctagaaccatagactaataaagattagctgatacaaacacctgcccatacctatattgtagtgtacaacatattctccatatctgaagctgattgaactgtcaagtttcagaatgataaaatacaccacgtgcccccatcggaatggagggttggcagctgcgatttcccctcattcttgctgtcattttcaggtgctcagcattccttagtgcgtttgagattgtgctaactaatgccaagtggtataagatcaacgaagccaaggtctcgctagaatctgtttccctctcctattaccctaagctcttgcctctttagctttgttcaagggcttctggctgcatgcaccctcgagatcgagaagcctttaggaatgcaggaacaaaggaccgagcatacaagcatatgcgagagccatggatggtccacgggtttaattatagttaaactcagccacattctctttgttggacctaggacatactccaggactctctactccgtatcacgaagatgtgaacaatatcaagcgtccacggatgctcccggcatcattccaagggccttttatatgttgtgcaataaacttccaggggttcatcaactgtaccatggacgagtgcagacgctagtcctgttcctgagccctacagttccagtctccacccttcacccttggtttcagcctgtatgtattgaaaagtgttgaacgcaagttacaagtttccaatgccaagaataccgtaatatttccaaccagactgtaaaatatacgtagatcatgtgaccgactccctcgcacatttgattcttgtctccggtggagagtgtgacgagagttgagccatcaaaagactccaaaagtgccatgaaacagtccaggtggaggtgtcggccctatacattctccacatcatcgtcatcccctgcagtcccgctcaaagtctagaactgcgtccactgccaggctttgtgactaggccagaacactcgatttcgacatccgatccctggggaagggacttgacggcaacgcaagtacgcacctaaaagggccaggcccaatgacaatgagaaacggtccacttttccgggaaaagaatataagagaaagagagacgaattccagactggatcattttctgtagaattcgaatctcgttcttttcgagcacagaatacttaccggcttaggatccgagaagaaagtagcgtagacttcattcacagccgagaaatcagccatatccgtgaggaagatgttgaccttgactgcatcttggaggctcgaccctgcagcctctaggactgcattgaggttgcggaggatttgtcgcttttcacatgttagaaaatatatcacaaatcaggcttcgcgtctctcatactgttcggttctggatgcttccctccaccatttgacccgtggtcgggtctactcccaactgaccagagcagtagaccatgttgccgacgacgataccctgggataggattgggggtggggtgggtgcacccttggtactaacgggggtacgtgttggcttggacatttttgaaagatgtgagtgagaatgaattctgtcagaataggatcgagaggaatttgttgagagtagtccaaattatctggccccagggacgttatcgattagaaatccccacattgaccgacttcccgaggtcggagccctctggagccctcttgagcgcccttgtatgttgtaaagcacaactcccgataaggagattcttatagacggccttaaagccggtatatactgctatatatatagatggtgcctggccaggatcaccctctcatagtgctcttttagatgtctatatgtccttatcaagtatatgaggttaaggtgaagactttctgattaacgaggtggattaatggagtagaaccatgtaggtagcgagacaccgcataaacctatgatatagcttcacggtggcagatcatatgatctctgaatatagaaaggtacttagatggtgtcatggtgcgatcgtaagtcatataataggtattaagaatactatagggatatcgtacttaacttatacaagctaattgagaattgcagccaggtggatatacccgaagtagctagtggggagtgtgaagagtgtgtccgtagtatttctcggaatatgttgtataataatgcatcactttattattcttggcgagagcaggatcacccctcatagcaacgagacatttctatggtaccataccacctcaaataacaaggcgggagagatcgtcaaactcacgggaggagatatgattgcgccagaagcgcagaccctcaattccttcttctcgacagagaagcccccgatcttcagccatctccagctcttcggcagccaccccgacgctccatttgaaccgatgcgcggcttcttgtgcagtgacggcccgaccaaagagagaccaatcccacgggacaggatcgctaggcggaactcgccggagctcctccatccaggcctcgagtttttcaatggtcttctcgtcactccagtcatatcgctgtacaacaagaagaccgcttttgaatcttcgtagacgcactggtaacttgagcttctcccacagctccgctgctttctgaaactccgaaggactggtcaattccactccattacgggaccgattgaaaacagcccagagatcaattagactcataatcccaccttcccgctgcaaaatgccttttcggtcatcagtgagatactcggctaggtcgcgcgcaagttctgataaatatagactttcagacccagaactaagcatgtctttagttgtcaccatcccgagagccgcagcggactcagatagcaccacgctggtttctggagagccttcgttagtagccatgccagactcacgcgccagggtctcggccagcgcaacgatctgcttggcggaggccatcaaagcctccaggtcttcaaaggcgttccctatgacctgctcgtttttcctccgggcttccagccctcggcgttctaaccccgcgataccaaccccggagtgtcgtggtgccgagggtataggactttcaacgctagcggcaggagagggtaaagctggcgaggaggcggtttgcgacggcgaaggtactgggggcgcattttgcaaaagccattttctttgaaccaaggcccccttgagtctttcatggaatgtcttatcaccacctgcacgaaatgaaagtttaatgctctcactaatttccgtgttcgcgatgtgcgattgctcaaataatggcgcaggagagtccacacgattagcgttcgccgaagagccagcagatagaggcgctccacaaatctcgcattccacaagagacggatggttcacaaaggtacaccgcctacaagacacagttcccctgagctcagaaggcgatagagacgtgttggcatttggttggcctgtatctcgtgtagtggctggtgatgcaaccgaactcagcaatgtagactcccggcttgttgcagcactgatcgccgctttgagaacggtcgtaaacggtggtttaatgccacatgctagacaaggaggtaaatttgtagccgcactagccgttgcggggtcgaaattggacggaactgggttggagaatgagcatatgggacagatccaagtggcattgattggctttggagatggtgaactctgtgagaggttggtctgtgggaggtgagagagtgactgcgttgaatgaagagccgattgttgggctacagtcgggctagctgttgcgctcctcgactgatcggccttcttcttctgcggtttcgggtatatgatgagcttcggagatgacttcaggaaaccagccttgaatccatgggtttgttagtgattggccaaaaataaaagcctcgaaagcaagatgtatgcatgtcgcacctgagactccactctatcgatttcttttagatcaatagccactgagtactttcgcgggtcctcggccgcaacatagcacactctgtgagatgtgagataggcatggccattttgataattctggattttgtatttccttttgcctctaatcagcaccccgcatcagaagctcaccatgagctacttacccttcatacaaccccaccgcatcttggacaaagagaaggatctcatcaggtaatagcaatggtctgagcgcagtagtcagatccagcgacttgaagaacatctagtaggttcaaccagctcccagcatcaaggagatccataaagagtcatgtccaaggcgattacgataacccgataaggcgggatgcatccgtagtcggacaaactaaagtccggtgagtaagcgagtatccctcaccgtcacgagtctgtgtggacttcactctcaccctccccgggctcgtgaacatctcatctcgtcttggaaataaacgttcatcaactgttctcttctctcaaaacagtaccagctgaggagtaagatcaagacttgattcttccagcagttcctcgattcctgccccttcgtagctcttttcattcttacatcttgtttctttgttctctttcaaatcttgcatctacgatgagttccagcataccaccttggcgttctaccacaccaggcacaatgtctagtgcattccctccaagtggtaagaaaaatatttcaactcaagtctcgttgctctggtgtcaggagactaacaacctgacagcggctccagcatacactccagtccaagcgcgtcgtagcctcgcccatcataccaagccaacaaatggaaccgttcctaccaaacccactcagtcggcaccaccggatacagaagcccgggcgcgagtggagttccccccacccgtacgctcgtatgtgcaacgctgttttgctcccgaaaatcaggttgcaagcgtgagcattcctgaaatgcaggagaagctgaggcacgtcattacggaggcggcccagaatgacaagctgggattgatcgactgggaaaggctacctttgccccaaactatggtgcaaaatgaacgcaacaagatcctggccaaccccagctcttcaaactgggcgtccagccacccggcttctccgggagatgccacacggaagcgaaagtcaactgatggccaccaatcggaaactggatcgccgccatggagaaaagctaaccgcaatcgttttgaagatcgagttactcaccctaccacagagaaaaaaccacgcataacactggaccagtctagtaagtccaaagctaatttggagatgaggaagaagcgttttgagggaattggggctagcgggaattctccttcttctcctgcagaattgccgatgcgtcctgctgacgtggatcacggccccgttgtcgggcgatgccaaacattggagaagaactacttccgattgacatctgctccgaacccggacagtgttcgtcctttgccggttttgcaaaagaccctggatttattgaagagaaaatggaaggacaatggcaactacggttacatctgtgaccagttcaagtctttgcgtcaagacctaacggttcagcgcatccgaaatgaattcactgtcgtcgtctacgaaatccacgcccgcatcgccttggaaaaaggggatcttggtgagtacaaccagtgccagacccagctacgagtgctgtatgcgcagcatctgggaggacacccgacggaattcaaggcctatcgtattctctatttcatttacacacggaactggacggcgatgaacgacgcactagccgacgtaactgcagaagataagaaagacaaggccgtgaaacatgctctgaatgttcgctctgcccttgcactcgggaattaccatcgtttcttccagctataccttaataccccgaatatgggagcctacctcatggacatgtttgtcgatcgtgagcggttgagtgctcttgcaactatgtgtaaagcgtgagtctcttgatttcgcatgttctgtttgagaattctcgctgaccttttatcgtagatacaaaccagatgtcaacatccgatttatcacagaagagcttggatttgagtctgatgagcagactgcacgttttgttctagacaactcctccgaagaactgctggcggagagggacggcgctgtaaggctgttgacaggcaaagcaggcacgctgttcgatcaagccaaagaagcggcacaccgtatcgtcgatatcaaaggccagatctaaccaagttctcattttccatctctttcttgcggcgaggattaaaccattggatctcagtcaaagccattttctcattttcttgattttggcgtatcttcaaaagcgggaaggcgtttaccacatacgtgcacatggatacaacataacctttcgagagtcgattgcacattgacatagtaaatacctataatatccaatctatccagtacttattccatatgcacagttctgccttgtatgtcaacactcgccttcaattgcacatcacggtagtattaggaagtgagatatgatccacgtgaggcgagtgagcaactctggtcgagaccttttttgtgcgggaacctgccaagcacgtacttcgtagggtagatgtagatgtggccaatgatcgacattgaacagagtttcttcagcttgccagtgccttaatataattgttttaacttttcatccttgtatctaatattcgagagaaaagtacggagtacggagtatcctcacacggatacagtcggcagattgcaggagccgcgcattcgccccggaaatctaaaattttttaatattagggaattaagcccccaatctaggccctttgtttctgatacatttttcatatccattttctttgttcggtggggtatgcaggtaggtgctccgtacatatccagcctaaattaatttcctgaaaaatcattaaaatagaaagatcggaacggcttccaatgggagacaacaccaaaatccacggtagaggtaaactttgtaggtcaaccatggttacaggtggggaaatgaggggcaaagatccttctttttcttctttttcgttctgtgtacctaccctttctagtacatatttacctgtatgtataactctgtatctacctatataggtaagatggatatatgcatgtacaattaccatgtacaatgatatatgtatgtctcgtactagtcaaggtcccacgggtacctatgggagatgacaaatggggagactcggacagaatcgcatttagtctagtagggtgtgattcaattacactagccgccgatggtggattatcatttgtctgcccaacggcaataataataaataaatactagagctggcgaatatattctaatggttctaggtacgacacctgacgatgtatacaccgaggctcaacccaaggttcagggttggcgttatcctgtattgccatgaccatacgatattgcagataaagatcaaagcctacatgcatatggagtactctgtatagatcctgaaatacccagaataccctcaagaacatcagaagatcccaaagaaagcaaaaaagcaaaaagcgggcccccctggcaatcatccaagccgcgtggttggaaccgcaatacggattacgctggtcaaggtatatacacctgggcatttgactaggccttgctcctcctttcctcctctttgcatctctccttgaatcccttcgccctcttttaccatgaaggtgagtttccctcgttccgcagtatgacctggtatcgtgtttaattaatccggtttctaaaaaaaaatcaaattccaaggcctttagacgatctctgaagggggagaaagatcccaaaccccatcatatctctattacacccaagtccgctattgcgattctacccccgaaaaaagtgagttgcgtccttgcgcaagttcgccagttgcgttgaaattcgccgctttctttgacccctcgcccctccttgtcccacttccgactcgttcttggcagtggctgaccgcatttcccaggtaatcaaagcgctttacgactaccaaccggaggggatctcgcaggaattggcattcagcaagggagatttctttcacgttatcagcagggaggacgattcggattggtacgaagcgtgcaatccgctgatccctagtgctagggggcttgtgcccgtctccttttttgaggttatcggcaaaaacgagagggatagtgggggttccggcgacctgtccaaggaccaccacgactcaggattctccgaccgcggtcgttcccaagattcttccaccaccaagaacggcgcattcagaatgtctgcactcaagggtcaaggcgctatggtctacggagttgtccagtacgatttccaagcggagcgacccgatgaattggacgcgaaggctggcgaggccattatcgtcatcgcccaatctaacccggagtggtttgtcgcaaaacccatcggtcgtctcggcggcccaggtctgattcccgtttctttcatcgagttacgtgatatgcaaagcggacaggctgtggccgacccgcttgacgcggtgcgacgcgccggtgttcccaaggttgaggagtggaagaaaatgacggcggaatacaaaaacagcagtattacactgggcaaaattgaccctggtcacggtgggggcaatatgacggctgtcacctcgggcatggataagatgtccatgggccaccagagtcaaatgagtcaaaatgacaatgtttatgtatgcaaactttctggttcccgtttgcgattactaaccgatgatgagcaggagcaccaacgtaacgccagcaagggaactttgtcgcaagtgcccacatcgcaacagagccaacttctcgtccccgtctccgcctatattccgcgctactgtttcgataacgacaagtattggtacatcatcgaggcgaagatggaagacggtcgctgctgggagctgtcgcgttactaccacgatttctacgacttccagatcgccctactgacccaattcgaagatgaagctggcaaccgtggccgtgggcgaacgctccctttcatgccaggccctgttacccacgtgacggatgcgatttccaacggccgacgacagaacctggacgaatacatcaagaagctcctgtctatgcccccgcatatttcgcgctgtgaactcgtgcgcgaactcttctcgccccgagaaggagacttcgaaatcgatcccaatgcgttcggcgaggatgcccggttctcgggtggatctcagcactccgtcgtggatccccagcaaaccgtgtcgcgccagtcttcgcagcagcaaatcaatgcatccaccgagcgggtatcccagcagcgcgccccagcacccacgccctacgccaatggtggcccgccgcccatgaaccgccaacctagctctatcacccaagcttctagcgcatcggccaacagcgcgatgaaggtcaaggtgttcttccaggatgaccttattgcgatccgcatcccatcgggtgtgagcatgcagcacctcaaggacaagctatgtgaccggttgaagattcaggacgatatcgttgtgcagtaccgtgacgaatcctccggctcctatatcgatctctatactgatcaggacctggagaatgccatgcaacggaacatcaagctgaccctctttgtcagcgtcgcataaaaagcactcacttctttcctggtgttgcggtcaatagacttgcccatgatttcatcgatgaggttatttattgtcaacctcatattaatgtttgccacgagtaaggttggtgcattggagtttttgaatgacgcatggttattccttgatttgtttttttcttctttttcaaactgatcatcagttctttcagcgatttcacatagtccatgaggacgagatcgtgatttaacgaatctgatgcgagatgtatggcacggtttccttcctatctgcctattttctttttctttctatttcttgttcctgcgatgtggcattatgggctttcttctatttctgcgtcaatttcgcatcagatctacatctcatcctattcaggatcataccccggtctgcctgcttctgtgttgtgtacatatttttcttacttctcgtgcatataccggggaggcctttttcatatgggagaggctcaaccgtggtatctcacagctctttttgcaccagctataaatgttgatatacattatttgagaatattagaatcgttcgggtagagatgtcgccatgatagaatatcacgtgacttgctgacttgatctttgtcctgatttgttcttccaaggttcgattcttggaatgttattctggtcgtggtccgtcacaaattttcaccttgaatcccagagctgcaggagctgtatatatattttctgtgcatgttgtaattcggcatctttagcccgggcgtttggcttacgaggacccgccaccactccagagctatccggaggaaaaacaaatccttgcctacaatacaatacctcggttaacgccttcgcatcgcaaccgctctccgccagggaaacccgacctctagcccaccgtcgcacccgcaaatataacttccaaaaaacctgccaatgagccgcccatcggcaaagctatgcgcggaatgtttcccaaacgcgctgcgggcgcctcggggcctccgccctacaatgttgcggggcgtcgctcgtagattttatgccacacagcagagggctctcggtacattacggcggccgagtcgatctccgttggtatatgtctctccggagaggatccgctcccagccggccattcagtcaccaaagggccgaggtctggctacagtctcggacggcgagaagaacgccgctcctacgccacgggatgggcctatgagagaatatgatgtgcgtgtgcgggatgggagactgagagatgacgaatatcagagaggtaagttgtgatcaactctggcgcacatattcaagctgacatgcgccgatgctctagggatcatccaaaatctgcaggacctcttcgaggcactgaaagattaccaccagcctaaagttgttcacccagagcccgagtctctgcaccctgaggcaacgtcatctttcttcgggtctttgttcggcggtggcgtgaagaagcacgaaaagtccgctgtccccgataaccttccgaagggactgtacatgtatggcgacgtcgggtgcggtaagacgatgttgatggatctgttcttcgatacgctaccgccgaacatcaagagtaagacgcgcattcactttcacaacttcatgcaggatgtacataagcgcatgcacgtagtgaagatgaagtatggaaatgacttcgatgcactgccgatggttgcggccgatattgccgagctctcaggcgtgctttgctttgacgagttccagtgtacggatgtagccgatgctatgatactgcgacagtaagtgttcgattcccggatggggccattcaataacccagctgatgatttgccaaccaggcttcttgagcacctcatgtcccacggcgttgttctcgtcaccacatccaaccgccatccagacgacctgtacaaaaacggcattcagcgcgaatccttcatcccatgcattaacctcctcaagaccgatctgcacgtcatcaacctcaattccccaacagattaccgcaaaatccctcggcctccagctgccgtctattaccatccgctgggcgaggccgcacagcagcacgcgcagaagtggttcgagttcctgggtgaccctatcgatgacccgccgcatgcagactcgcaagttgtctggggccgcgaaatcaatgttccctgtgctagcggcaaggctgcgaaattcaccttccaggagcttatcggcgcggccacgggtgcagccgactacctcgagctcgtccggcattacaatgcattcattgtcacagacgttccaagaatgaaccatacccaacgtgatctggcgaggcgttttattacctttattgatgcggtatatgagagccgggtgagtaacgagcaacgttcctgttcacctttttaccgtgcagtcaactaacaacccccttcaacaggccaaattagttctcacgaccgaagtacccttagcagaccttttcatgtccgaacctgatacgaagaaaggctctaaaggtgacggtggcgaccactcagatctctccgatgcaatgcgcaacctaatggacgaccttggtatgtctgtgcaaacgctgaagagcacgtctattttcagtggtgacgaggagcggtttgcgtttgcgcgtgcgctttcccgtctttctgagatgggaagtaaggagtgggtggagcgcggatcggcgcttgaaaggactcctgcgcagaataaggaggatcgggaggcttggcaaaagacgaggagtcattggagtgaggataatatgtagattatattgttctcttgcctttgtcctcttgcctttggttcttgccttttgttttgttcacacgctacactgtgctgtagagatacctgtgcacatagatcgagtttggtgtaaatagcatagctcttctttcaattatgaattatccctatggattgaatttgttctgctcctcaaattgaacctacaacatatattcgggacataaatctccttatatcgactgtcagctcaattcctcatatattggaatttggagatgcgcggacatgttttccaccctgatatcaggtgacgtcacgtcgcatccgaggacaagtttgtatggtatttcaagatccctaataaattcgaggtccgaatccaggcataaattcacgtcatcggcctgcaatcagcatgactccaccataccagtgccaataccttgtattgcctatggaacccccaagatcgaccacccaggcaacacaggcaaaggttaccaaactatggctccacctccgtgggattgcaggaaactgccccgcgaatgaaatgggagcaattcgcaatgtttcttgtctattctgctccattacaggttttcctgtcggcattggttggtaaagtgcccgggcgttaggttagggtatgggtggtaggtcatactatggtcattcttgcaaagcggttattccatcctggttaaactttggcttgggcaatcgactttccgctttgtaattagacgacttcatttcgttggtagatggacttcaggatatgcaacggggaattacatcattgacgtcgcacctagggaattgcacgatgaccagcttgattttgatatataaagcggaaaattcagccttacctatgctactctttcctctctttctctggtattattgatatcaaccacacttattatggcagcaaagtcacactccaagactgcggacggcaaatttgccgatctacaaaaggacaccatcgaagtcaacgacaagcagcacatgacaactgacaatggcgtcaaaatctccaacccagaccaatggctccgcatcgtagacgaaaagaatcttgggccctcactcctggaagatcagatcgcccgcgaaaaggtatctataacttacattcatccacatatataccaatatatatctaagcaaactaaccaacaaacaatagatcacgcgcttcgaccacgaacgcattccagagagagtagtacatgcgcgcggaagcggcgccttcggcacgttcaagctattcgagagcgccgaggacgtaacaaccgcgggaatactgactgatacaaagcgggagacgccgctgttcgtgcgattctcgactgtgcagggtagcaggggcagtgcggatacagtgcgcgatgtgcgcgggttcgctgttaagatgtataccgcggagggaaactgggatatcgtcgggaataacattcctgttttctttattcaggactcgatcaagttccctgatgttattcattctgttaagcctgagccgcataatgaggtgccgcagggtcagagtgcgcacaataatttctgggatttccagtatctgcattcggaggctacgcatatgaaccagtgggttagtatttctccctatttggttgtgtgtcgatacctgatagctgatgcggttcgtgatagattatgtccgatagagctattccgcggtctctccgcatgatgcagggattcggcgtgaatacctattccttgattaacaaggccggcaagcgtcatttcgtcaagttccacttcactccagagctgggcgtgcactctctcgtctgggatgaggcgttgaagatcggcggccaggatcccgacttccaccggaaagacttaatggaggcgatcgaggcaggacacttcccacgctggaagttcggcctgcaactcatccccgaagaaaaggccgacagcttcgagttcgaccctctcgacgccacgaaggtctggcccgaagagctcgtgcctatccgctacatcggcgagatggaacttaaccgtaacatcgacgagttcttccctcagaccgagcaggtcgcattctgcacgagtcacattgtgccaggcatcgacttctccgacgatcctctgcttcaaggccgcaacttctcatacttcgacacgcagatttcgcggctcggaccgaattgggaggagctgcctatcaaccggccagtatgtccatacatgaacctggtcaaccgcgacggccagggcagacatcgcatcactaagagcaaggtgaactactggccgaaccggttctctgcgaatccacccgcgaccgcagagcagggcggcttcgtcagctacccggcaaaaccgcagggcgcaaagaagcgcgcgctgtcagagaagttcaaggagcacttcaaccagccgcaggtgttctacaactcgctctcaccaattgagaagatgcatgtggccaaggcattctcattcgagctagatcactgcgacgaccccgtcgtctacaagcgcatgtcagaacgtctaacagccatcgatctagacctagccaagaccgtcgcgaagaatgtcggtggcgacgcacccgtcaaagcctccaaggaaaacaggggtatcaaagccaagggtctgagccagcttgaattcatgccggagaaacccatcattgcgacgcgtcgcatcgccatcctgattgctgacggcttcgacttcaaccagtacaccacaatgaaggaagtgctcaaggagcgcggcgcgtttgttatcacagtcggtacgcagcgccagggtgtgactgccgagtctgggcagaaggttatccctgaccacttctattctggaatgcggtcgacgctgttcgacgcggtctacgtgcctggcggaaagcatatccaggcgctgtcaaagaatggcgtattcaagcactggatttccgagtctttcgctcatctgaaggctattgctggcgccaacgaggctgtgccgtttattgagcggcagatcgggctttctgaggtcgaggttgcgaagagtggttctccgctgaaggagtcgtatggtgtggttacgggccatggagatgcggtttcgttgttgaaggttggcacggtcgcgcccgattcgaagggtctagctgagcaatttatttggcatgtttctcaacaccgcaactgggcgcgtgagctggatggactttcagatcagattgctgcttaagtcggtgttgcatgtgaaacgaattggatatgtgaccatcaaaattgtatgagcttttttttggttaaatgagagctaagtcatttcatatttctaaaatttaatcaaatttggtaaaagtctcacgaatccaaggccgtgtaggtggatctcacattcagatgctatgggtatgatacactgcgtatgtaggtggccagcctacattcttcatcggctgatctacaatacacaaacccaatcataagctcatgtagggttggaggaaatatgtttctgcaagattccatgctatcaaggccctctgccagattcttttaggccaacgtagcgctagcacttagtgcctgtgcctgcgcctgtgccgaaccctaacccttcccatataacataccccaaccgccagtagcaatgatataccaccattatagagacatcgaacaattgaaactagataaaccccaaaccctccatcatactcagcctcccgcataccacatccccatatctcataggggtcagggctactggtcacatttcaagacggattagttacactgcaggaatatcggaccagccgctttctgaaccaagagactctggaaggcagaagtattcatgatgtcctttcgtaaataacaagctatgtttctggattcttgttccattatatctttgatattggatctccgcagtcatggttcttcatctatcgcgctcgacacggctaagcgttgtgattggcatatcgacatgtttctttctagctgagatttcgcgttggttgccctttcttggtttctgtggtactggtcttggtatgatatcgatgtgctgataccgggctagtgggcttctatacccattctattgctctgattgcagatgctttccactatgtaagcgtgtttgggtgtggagttggagattgtgttggttaacatatattgcagctgaatgatttagttgggtttattattgctcttgttgcattgaaggtacagtctggtttggccgtcggtgtggtggtcatgctgatgtgaaatatagaaatccgagcgcagtgactcgcctaaggagctcacctttggttggcagcgggcgcaactgctcggtgcctttttcaatggtgttcttctgcttggattgggcattagtatatttttacagtccattgagcgatttatcgctctacaacgtgggtgctatcgcccaggctggattttgtctcatttgattatgactgacggtgcgtttagatattcacgaccccaagctgatgttcatcattgggtgtatcggattgggcctgaatattattagcgtagtctttcttcacggtagggttcgtggggtcatttttagtaccatgctaacagtacccagaacatggacatgatcatggacatgaacacagtcatgaccatagtctatcacccacgattgagacaccggttcttcacctcgacgaggaataccttgattccagcaccaaggtaaactgcaacaaattgagcgatccaattaatggagaccgactgacacagcttagcatgacgatcacaagcatcttcatttcgaaaaacatcgctgtgcagactcaggcggccacagccatggtcatggcggccacgaccacggtgatttgggcatgatgggagtgatgatccacgttatcggcgatgcaatcaataacttgggtgtcatggcggccggtctggtcatctggctcgctgcaccctatgccggccgatactatgcggatcccggtgtgagcatgttcattgccatcctcattattctatcgtccttccctatgagtaagtgtggtaccagcatgaatggttgaaaaggagatagcgaagctgacactcttcagtgcgccgggctgggatgatcctgctagagagcgtgcccacaggggttgacatgtgcgatgtcaagcacgacctagaaaaggtatttccacctttcatcttctctttcttcattcctaacaatcgccagatcaagggcgtcaattcaatccacgaactccatatctggcgcctcaaccaacaaaaaaccctcgcctcagttcacgtcgtggtgtctgaggactcggtcgaggactttatgaagacggcgcgcgtgatcaacgagtgtttccacgcctatggaattcactccattacactgcagcctgagctgtcagatgcagttgattcgcaagatggggcttcgcaggaatcttcccggtgccaggtcatttgcgggactctctgcgaacggttgacttgctgcggatagaccagatcccttctcataatgtcgagatggctaagttttggatatcaacctgccaagtggccgagcagtaactcggccatcgcattcttccttggtctagtggtgatgatttccgcttgtcattaaaaccgataagcgcgggagaccggggttcgattccccgagggagagatttctttttttttttttcggtttagacttgtttcattaagcttacattgaacaatggatgggagcttctattacgcatagaactgacgcatttaggctgacttatgatggccatattttcagcaagaaaaacaaaaagccccaacgtttcttcaggcagaagtgcgcgatgcgagataaagtgagacactaacggcgaggctcgggcaatgtgatttgtgttttgccactggagcctagactttgtttcttttttcacttcaactttatttaatcgaatgatatctattggtactttgaggaagaagtagtagagaggggtttgatagtctaggattgcatgaaagagcaagggaggatcttgtggcaattcctatatactctaggtatcgctattttagaaagagggacagcacacgttcaatggtccctgaattatcttcctggacattataagcaagcaagatgcattagcctaggtttcctctaatattacatcgaaatcgttacaaattgcgctgttgaagtagcctgactgggtgtacactatagcctgttgagctttgaaagtaattccttgacaaatgatttactagttatccaaagggatgtcccattaacaatcccctatataaaagtgtacgattgtaccttatcaacattgagcaacagccagtatgaaccattaaccaataagagctgcatagttctccactctgcgaataggacggccgtctactccaatggatagcaaattccgattccgagatagccaggtactttgtagatcacacagataaggtgcggggaatacgtaggacgaaggactgccttgtgtctctctcccctctttcttatatatctcagttcaccctccgaaaccagccatattccatctcaaatcactcatcaatatgactcttaattgggagatccaagcccaaagaggcagagatatcttgaacaattctattccgaaacaatggcttctccccgtcgacaggctgccgccagcctcgcagaagagtgtgattgacttcccccgacaaagcgggttgttgaatgagcgcgagctcgttatcactgatatgtcggccacggcactggtgaccgaaatgggtaatggaacaatgagcgcggaagaggtggtgactgcgttcttgaagagggccgtgttgggccatcaactggtgagattgagattgggagatgtggactgtgtaattccaatgttgacatgcttgtcagctcaatttcgcaacagagttcatggcagacgaggcaatcgctcgcgccaaagagcatgatgagtactacagacgtacaggaaaactggtcgggcccctggtaagctcatatacatgttcaaatttatcacagcgagattttaatgaaacaaccacagcacggtataccaatcagcgtgaaagaacacatagcaatgaaaaaccgaacatgcaacacgggatacgtagcttggtgagtataaatccaccacgacagcccgcattgctgacaagcaaaacagggtcgataaagtcaccacggaagatgctcttctcctccaacttctatctaaagccggcgcgatttttcacgttcggactaacgagccccagtcattgatggtatgtccacaacttccacattagcggtgtatcccataaccaatgccatctagcatctatgctgcagcaacaatatcaccggcacgacattgaacccacttaatctcactctcagtccaggcgggtcctccggaggcgaaggtgcctcaatggccttccggtgcgcaccacttgggattggcactgatatcggcggatcaattcgctgccccgcagcgttttgcggtgcgtacggcttccgtccttcctcactgcggaaccctgtaacagggctcaaagtcgctgcttcgggccaggagacaatccgcggcgtggtgggtccactggctagttgttcaattgaggatctagagctattccagagagctgcattggagcaggagccttggaatattgagacatcgctgatgcctgtggcgtggaagacggttcttccgacacgggatatgactgtggctatcatgtgggatgatgggtatgtcgtgattcaaataaatgtctgctgtcagtatgttaatccatttcccagctgcgtccgcccccatccacctattactcgtgctctgagacacgccaaggagaagctggtagcggctggtgtgaatgtcgtagactgggaaccgtataagcaccagcatggctgggaagttattgtaagtgctgggtattctctgggcaagcacgttataacgctaacatagcccagcgcgctttatactaccccgaagctggcagcaagcaacgcgaagttctcgccgaatcaggtgagccggcacgcccactaactgattgggctctctcctatagccgaagcatgccactttcgcaccccgaagcatgggccctgcaagagcagcgtgatatctacagagatgaatatcatgctctcttcaatcgtcgcggtgttgactttattctgtccccgacatatcccgctgccgcggcagtgatgggcgagtcgcagtattggaattatactgcgatttggaacttagttgacctaccttccgtagtattcccatctggaatcttcgtggatcccaaggtagacatgttgacggagcaagacaaagagtacgttcacagggatgaggttgatgagagagagtggcgtaagtaccagggtccggaaagatatgagggcgcgtcggtgggactgcagctttctgggaagcggtttaaggacgaggagaccctagcggcggccaaggttattgaagggattgtgagagacaaggaatacttgaagacttgaagacttggggggcttgggaatggataaattgattcgatgaattttacttacaacacatttacacctcagctatgtctcttcgtagcaaataccatagcaagcggcgtagcagtcttcactttcttcccctcaaaggccctctccatctcatcccacagtggattaatgtccacctctgatacactcggtgtcgtccaggtagatgaataacctctaaaccagtcacagtcctgctcatccatccaatccacgtcattctcctcccaaacaatctcctctccatccctaacttgactctcaccaactcgatcattaatcctaaaagcctcaatactcccccgagcattaacatataatctcctcacgccctcccagtcgtccacagggaatcctagagcctcagtaccagaattcaaaattcttagtgcatgatcaagcatcggatcatgaacctcattcgcataaaacgaacaaacagccccccaggccctctgagccctctcatttccgacaatgcgcggataattataatgcgtaatgacaagcgtcccacccgggcgtaactcccgcgcaaattccgcaatcgcaatctccggccttgtccagtggatacactcacacgccatgatcaggtcgaccgagccagactccacagagctcctttcggcactttccttcaggaaccggaagctagattcaggaaggccggattcctcgactaggactctgcgagcgagcgcggtgtacccgtcgttcggatcagagacgatcactttgttgaagcgcggggcgagacttgatgagacgattccgcagccggcgccgacatcctgagcaagggaccaggtggaatggggtttttgagagtggtaggtaaagactttttcgaagaaagagggcgggtagactggacgaaaggtaaggtagtcggaccagtttacgccttgattggagttgaagccatattctatggtgggtgtggtttcggatgacattggtgatttagatatttgggaaacgattgaatgatgagaggtgacgatgatatattcaactaatgctctaggggtaatagggtgtatttatatgttgttttcttgttttctgcttttttttttgcgaacagatatcattttgttatttgtcattccctaaacagaggtatagcaatgagaaagtgtaaaggatcgggattaatgaaccagaccgtgtctattcgttgggattttgggaatttgaacaatcttccaatcaaagaggttcagacagagatcttcgatcagatctctagaatatctctagatctcggagaacatcggtcaggtcgatctcggatctcttctcacatctagatcacataattgtttggcatactccatatgacctttctccttggtatccatggtactatcccgtgctcgtatattgcgtatactgcagctatgcttgagtttttctccaaccccctcgagttctgcacggtggggctggtggagtcgcggtgatcttcaaatagcgcctcaacaagctcctatacaaaagaatgggctttttgtgaactaagcgtagtccgttttctttttctttttctatctataggtaggtggggttaactgcaacccaaatacggacatctcaacccgactcagctctcaaatcctgcagcgacctaatctggccaccatcttccccaaaattcccaacatccagccatttctccatggcagacttcagcgaagcatcccactcatccctcaaaatagaaaaccaagccgtatccctatttctccccttgacaatcatatgttgtcgaaagactccttcaaatgaaaaccccaagcgtgaagccgcacgccgcgaaggctcatttagcgaattacatttccactccaacctcctatacccaagatcatggaaagcatgctgagcgaggagatagatcgcctctgtcgcgccggttgtgcgctggagcgcagccgagtacattacattcccgatttcaatgcccaggtgatcaggagtcatgcgcatcagagagagatagccaatgggttttccgaaagtggggaaagaattgcgcctgtcgatgattgtgtagaagaatgggtctgtcgaagtggatttcgatgcgatgctggttttgaaagtttcaacatccgagtacggcccgtcgaacatgtagtcccataggtctgctctagatggttcaagtccaccgatgagggcaaagaggtcatctgcgtgctttggcgagagtttctcgaggagaattgctcggcctggaattgtttggctcgttggtagtagagctggagtgaaggggactattggacctttggggcgtagtactgccattttgaaattgatttgtttcagctattgatgtttgaaattgagagcgcggcgatattatatggatgctaccagctaatacctagcggagttggccgtgtatatactgtttattggactgatctatgtatgactcacgccagtgtgatttgttgtgaatgccgagagtccggacgtgataggttgattctccgaactggagcaaaagtacagattgactcaatagcgaggacaattttgcaggaatttcggaagattagcaactaattacttacattgatgtggactatagacagctgcttctccttacctttaaaataaaccagttttgcccctctttttgtacagcaaataccataaaaagatcagctggaatgcgccaaaacacatgactatcccactaaacaattgaatacccaagtagttcaaatccgcactaccatcggcgccaattgaagcgagcgcacctgctattggtggtcccacaagactcgcaaagctactcaagctttgcgccattccaagccaagttccaagactcttgggatcgggacagacgtgagtgaaaacgctcggcggcagaggaatcaaagccccggagataccacctgtgatttgggtcaaaatagagcaccgatgacttggagaatgaacttcacttaccatagaaggcagcaaaaagaacaaaccgggcaaggctgtctgcactgatccaacaaatacacagaacgcctgagagtataccgcaaatgatccaagcaatcatcgacccatagtaatgagcgaacaaagtcaagacaacacggccaataaccgaagaagcctgggaaatcatcaagatattagaggccattgagcgcgatgtacctagttttgtctccgcgtaagtcggaatgtaatagaaaggcgtgatataaccaaggtaaagaaaaaagttcccgatagcaaagctccaaaaaggcaaatccttcaatgcgcgcaaatcaatcaagctcctgcgctgggtatttttaaccttcactgcatgtctctccggccacaaaagcataatagcagccgcgatgaacagcgccagcatcaagaacgccacaaggcggacggtccaggcgaacccaacctttgatataagctggttgaacatcgttgtatagataatacccccgacaggcgcaccgctactcgaaatacctagcgcaacagcccttcttgttgtgaaagaacggctgaccaatgcaatagcagggacataaagcagtccgaatccgaggcccatgcagaccccctggcttaggaatatggcgtagtagtcatgtgcaagactgagcatcattatgccgactacacctagggtactgccgacgagaatcatgctctggttgtagccaaggtcgaaaagtgggccggatagtagaccgccgacgattaggagccaggattgaatcgttccaatccaggcgatgtcagatgatgtcgatgatgggatataggtgagtgcatagtagctttggaatgtcccaaatgcgaggttgaggcccctggaaatcagttggttttgatattcaattggaagtcgaaagatgtttcacataccagacattgaagaatataaagaaagcaccgagaacttggagacagctatacactttactttttacagcaaaggtagagtgtattccagatgactcttcatcttccgtgatatgtgccagatctgtgacctcgggctgcgtcttgcctttttccgataacatgtttaacagcctcgaataagttcaattctaaatcaaaacggtagccaggattcgaaggaaataacaaaagctaagacccctcaaatgtattgaccagtcagtatattagccctgtaccgtatgcaacactgccgtgtttaccggtgatgcggggtgagtgtctttggggtaacaacctatcacgtatttcgaagcactgtttggagtcaatctcatgtcggatttgtaatttctacgctactaattagttagttaatatcgatacgaaaatatcacgcttaccaggattgagttgcgccattggggtgaaattgaccagcgaaaggtgtgatagtacctcggctaaaatcaaccaatgctttgtagtatgagcaatggacaagtcatacagtagattcgctagggttatatttgaggaagagcttgattggtgtagaccttgaatactacataatattcagtacagtataacatgcaatgaagataaataacctgctgggaagcatagtggacaacggaaccatttccgaagaatcagagctatcgataagtgatattgattttcacgttgagttatttttccttgaaaatatgatggggtatcaaatggagtcaagtaattttgatcatcatccaaagcattaattccaagctccaacagagagcataagtacatccatcaatacacatgtgcatgtatctgggaatagagagtaagcataaaaacatagaaacatgaaagcatgaaagcagaaaatagcactatcgtgacgatatttccatcattagaggagaaaaaagattgaacacctgatatcagaagcccaaatcagaagaactccacgagacccgggaaagccaagcccaagggcaatccagatagaaaagaaatcgcgaacaaaacaaaaggaacagcatgaagaaatgatcataatcatctacttccgccagaacatagcttttccaacggtcctgccagcagcccagcgagcttcggctagcttatccttgaaggacacaccgccgccgtagcgcacagggcgggaggaggccgctccagactcagaagtagcagtcgcactcgaaccgccgaaagaactaggagcgaagttcgtcatattacccgcatcgaacttcgtctttccttcaacgattttttgaacgacgttcaagatagcataagcagtagagccaacagcacgaatagccgcgaggacagcgacagaccacaagatgatagcgagatagatgtttgtgccgccggagtcaacaccgtagatttcggacacagccatggcgaggattacgtttgcgaccatccagatggagaccatgtaagtacggacagcacgatagtagtcctcctgcaactgggtatccgatggcgggggctcggggacctcgaggcgatcgcggaggttgcggagggccgcgtcgtagccggagtcaatatcgagttgttcggagggcatttcgatgacgacggttgagccgttgatggtctttgctgcaccgagatcggtgttgattacgttgtcacctttggttccccaagtgacgtcgtgggtgttgcagaaggcgtagacttggagaatgcagatgtagctgggcatgagcaaaaagtattggaccgaagaggtgaacatgtgccacgggtccaggtagaggaatgagctgtagaagtagagaccgacagttgacaacatggaaatcacaatgttcatcattaggctatcgccaacttctaggtcatcgtttccaaccccagcacgtgcgagtaactctttgaccaccaagtagagggcgcagaagaccgtgtagaacatgataatggcgtacacaatgataccagagagatagagattcttggcactgaaaagagaatgtcagtcaagttcgaatatatgacgaagcattttggactcacccttgcggtcgattacccagcgagataataaactgcaaacacataaccaggacacaggcatagcgcagaacaatgaagatatatttgcccatgttgtgaccaaatgggtcaagtttctcatcggttaaagagccagcaatgaaatagaaagcgaggtagaaattggcctgtgaaagtcagtggacgcccccaaagaaaacagagcgcaaaactcacaagaccaaagtaagtaaacagcaaattaaggaattgataaaagaactcgatgtgaagcaagaccttccgggtaaaagtatgatcggtcttccagatctgtttggcattgaaaatcgagtaaacagccgcgaagaacgcaccgttcagccatcttcgacgctgggagatgaactcaggaaccgagtccggcacatcggtttctccaacggcgttcttaacaaacttcaatacccatctctcttcccgtttggcgaccaactcccagcaaagaatacgatcttcggcgagatacatgttggcagtgaaaacgtctgcatcttgaccgtggagtgtttcacccttgaaatattggttcagggggccatgtccgtctgcgtcgttttgcagcgcaaagaatcgatatgcgctgagcgcaccgggcaacacagtgatgtaaccgaagactgattccagcggcttgtcgagaatattggacattttgtattcgaagttctgacttgccaccagagggttgagcagaccgagcatgttcttacctttagcagccttgatctctccagcagcgccggcaacattggagtcctgatcaaacgccttccacaagtggtagagcgccattggctctggtcgagttccaacatcgagcaaaatacaaatgttaggctgaagggcacgaccaaaggcattgaaaaaccatctgtgggagttcagcttcttcttgttgtgttccttcaaacagaagataacctgacacggaacaattcccttctccgcacccttaaacttgagatcatcatcaagcgagacctgcgtggtgtactcgtacacgtgtgcctgaacttccttttggttgacaatattcttcgcaataccctcctggtaaacacccagggcggccaatgcattgagtgtgcgcgggtggaccttcttacgtccatcagccacaatgcaaacaacgattttcttccatccatcgcggccccaagtacgcgacttggtgcgcgagcagaagtggctgatattctgcataacgccatgcatagtacgggtgaaaccaatctcgtcttcgttgtacatggtaatacaaataaacagctctgtctcgcgagtcgtggtaccaatctgctgccgaagcttatatccacgttcgccatagtcgtccggatcggttgtaacagcggtatatcgcatgtgcgtgaactcacgctcatcgcggcgagggaggaagctgtgaagaatggtgggaattttgcactccaaaataagctctccattgaccaactgaacttcttttttggcgacctgcttggatcggacaccacgacggccctgcttgtcgggtgctgggccatagtggaggttgggatccaaaacgtgcgattcgtcgtcataatcatcatcgagatcgactttggacatgccatctttctcgtctcccaacattgtcgattcgctcatgaatgatcggacactggcgcgtgaggtgtggttaattgtgcggccatcaccaccgaatggatcttcgccatgggcatcaccaatatcgatgctcgtatccattgttgattttggtccagtgaacaacggcgcaggaggcaatggtcgacggggactacccccatatcttgagctgggtgtaccgggccttggactaccgtttaaatcggcgcgctcatatccaacacttgacacggagggtggtcggatgtgggatgggctccatgggcgaattggcgatcctgtgcgtgggggaatagatgggtagacagaagtgtctgcgaggtttgctgtgggaggcgggatactgggtacactggacaagctggatggtggacgcgaaggtgaagcgacgctaggcacctggtaataactatcatagcttcgatcatgtccggtcctataattgtgcgccctggtgttagaccttggtcttggaagacgttccattttgccgcgaagctggcactaagaggcccaatgtggaggtggaggggggatgggacagtaaacaatgcactagtatcaagtgtacaatgtttacaatgtttacagggtgggtgattgacaaacagcaaggaaggaaggagttggctcggtccttgtagcaatgcccattgacgggcaattgctcgaggctcccagcctctccgtcccgtcaatgaaggagtcggatttggcagtgcacgtggctccatcgcgagggaaaccactggaatgtgaagacggacagggttgcatcagagacaattgggaagtatagggaagtacatacggagtgtgatcataatctgggtcataatgggagggcatatgactgatacctgaatcatcgacaccgtcgccgcttggcaacaagcgcatcgttcctccattcagacgtgaggcattggtcggagagtcaggatcggacagataggaacttgcgtcatggttgaggtatgcgggcggcgcgtcgccgtattcggatggcggatggcggttcatgatagaacgtggaatgtgatgtttttttgtttcaactcactgcctcatagtattccacctgaggtgggtatcgatgagacaacgatgagaattaatccccgtctctcgaagatacgacagagtgggggtagatctgtttggttcgacagatgaggctcgaggaatggaggaatgtgagtataatatcaatattaaagctccacacacaagcaagatgaagaggatcaaagaggatcaaaggggataaaagagtaaaatggatcgactggggaaacaagtccagcccgttcatatccgtcgctctgcatcaacaaggtggaggtctaggtggttgtcagggcaacgctgaatttggcgaccgaatcagcacgggaaacacttggaaaacaatactccaattagtattgaaatgaaatatcacaggagattcttcgttattccattttattccttcccaatgcaatatcaaattgtcaatatcaagtcgccaaagtattcatcgcatcttcaatatccccagtcccaagtgggtcgatgcattctgacatgaatacgccacttgaacaaaactacattattccaggtggtatcacaaaagaatgcataattctgccaaaacaagactggccttgcagatctccccaaatcccatactttcattctttggttctcgttctgggccttcagtcccaacgaacaactggttaggttaggttaatcatggcagtaggtcctttgttgatgccatgatgacaccgctcacaccccctcgttgagcagtggctctctctcccggtccactgaatcggggtgggcaacacgacggaagaggctgtcgcggccggtgtacttagtcgtggaaaggtacagagagacagacaagaacacggcaaatacggtaaaggcaaagatccactgcagggcaatgatctttatagcgacttgtctgacagcgagtgctagggttatgtatatcagcaaggcacttaagcaaatgatagtaaaagaaagaacttacacagagtcaaccaacttaaacaatacccaaggatataatcctcgcgagggacgatactgaacagtccgattgcgagaataacccagataaagatgttagcaacaatacggccaggcaggttatggctgtgaacagcgactgcgccgttccagaacaacgccatcaatgtccaggcatagggaccggcaacagcgggtaggtggacgaacaccggcaggccactgtggcgccagtaggtgactgtctggttgatgaagtgggcgatgaggatgatctctgcgccccaaaattggttgcgggtccagagcagaatccaagcggcgaggaagacgttgttcaggatgaaatgggtggcgacattggcagctgccacgacgaggacattgttcttggaaaagaggtgccagacgtagctgagctgagagaggaggaggaatatcctagatgggggattaatttgtggacatcccaaagctatagacattggctaaactaaccagaaaaccccagtcaaagtagtgttctcgctgaatggagtattatgcttattggcctgcttccagagcttcttgcccttcttggtatcgtcgggcgagtgaacggaatgatagatgccgatcactacgaccaaagcccaggtgagaggtacaaagactcggtatgtattcagcgaactggcgctgtgagtttcgcgtctagcgaacgggttgaatgatgccatgatagagttattacccaagctgaggaagctgaggaagccgatgataatttttaataaaaggaaccgagagtctagaagatgggggtcttataatcaaggattaaaaggggattccccgcatatggtcatcagaccatactattccaggacttgcagatgaggtcaattccatggtgatgacatcaacgcttccatccattgagggtcacttagggttacttccaactacatagcatagttatgtactccatctcgcgaaagctgaagagaccatgatttattctatcaatcataaccacatctttcggttttactagaaatagaaatacttgtgtttctgtgaaacatggactgagcgtcatcccagtctaactacagtgagaaaataacctgacgtaaccttgatcaagcgtagatcatcgcgcacagtccttttcaatacagatttcaacctcaaatacagtgagcaagctaaaaatccaaaagtactcgagttattatgctgagcgtaggaccttgggagacagaaatcaaggaaaatgagacccgcaactgagctgagcctaccttggcgccggaagacaatatttgaacttaaaaataaacttgaatggcatgttgaaacacgcgaggcaccgagtttgattctactcagcgttttacatactagtagtatgtactccgtatgttgtagggaataagtattactgtccgaatttggtaacgcggggaaatggccagtgctctcacctcatgccggtagaaataacagtctactttgcacacatgatgtgcaaaagtactagtatcaatagtaaccatgccaatgatatggttatctagggtatcaaaaccaacgtgcaaaaatataggagggaaaagaaatcacaatccccgcgcctccctcacagcctccaaaatcctcccatgaaccgaagccggcccaacaaccataccatgacacccagccagggtacgacccagcgaacaatcaactggtttcccctcaagatctgtaacaagacagcccaattcctgcacaataagcatgccacccgcatgatcccagatcttcgagcgataatccgcactcaacggcaccttaacgaaagcattacaccctccctgcacggcaatggcaatgtaacgcatctgcgctgaccataaatccaccggattcggccacggacagccaagatgcgccgccacacgagcatgagcctcgagatcctgcgtctttgccgcacgcgtatcaatgaaccgcacaccggaagctccaacctgcgggacatgttcaagcgggcgtgccggcagcaaggctcccggacccataggtctgatggtagctccctgcccgacaacggccgagatcatctggccaagaccgtcacggtcgacgcggtcttcagcgacgagtcctgactctaggagattcgggcagccgaggacgccgattctttggatcccgttttcgactaatgagaggcagactgcgtactgctcgccgcggatgaaggttgctgttccatctacgggatctagagtccaggtcctgctagtgggggtgcaggcgccttttgcgccgaggtcaattaggtcgaggagttcggaggtggtacgtggagtgtggagaagggcttcgctttctgggtcattgaggtggatgctggttgctaggtcccaggttcttgcgagaagatctgggtttgagcggagggctgtggcatcttcttcgccgacgatatcgtcgtctgggaagacgttgtggatggctgcaattattgaggcttgggcggcaaagtcggcgattgttacgggtgaggagtcgctcttgtcaagggcgcctttgtcgacagcagagaggagctcttttgtcaggatggctgctcgttgtacagctaggctggcgagctggagctctttggcgtagggcattgaggtcattgtaggcggctttaggggttgtgtgtgtggagggtttcgatattcatccagggtagatttggttgaccggatgtagaaatgacagttctgagcgacaagtatgaaaacggtagtttattttttgggacacagaggggcatcacgtgcagcgaaacaccggtgagtacatgtatgtatccctacgtcatatctcaatctatactgatccactacaatatcaatagtatcatgagcatatctggtcgaaagatcttatttggcacagactataatataagtaaaggcgtcagaaaaccttggacataaaattgcgtagagattcgtcagaccatactcaatatatataacaagaaatatgatcaaacgttgtatcacaagtatcaccatctatacaccgaattcaacaaatccttaagagcttttatccagaccaactcattacaacctagccttgtcttcttcacgaccctgaaggttagggtgaggggttcgaatgggtcgagtaaccgcgtagaaggcaagcccttgagacttagtcgagaactagaccgagaaattagaatacttcaactaatatctcgcgtacgagggtcatgacaaaccttgaccttagatccaacatagaaaaaagcaaagtctcccgggactaggtgatgggtgacacctgtcgcctcgtcctatttgtaaccgaaatgatcaataaccaaaagatttaagaagcagatgtcaaggtataatgggggagataccaaaatatcgatctgaccattgaggatatactttgtctcctcaaaattgtagtttgcgggtctttcgggtccagcctcgatcttatagaatcccgaagtgaagtatgcaggggattcagtattggtgcggatagagtggaagtcggcagtggtcgcgttctcgccctgaggaagggggatgaactcgtggccagcgcctttaatgacggtaataggaacgatattgctagacactttccataggtgaacgtattagagactgtatgatttgttctggaggtcgtgaggaaaaactcactgttgctatacttgatagatatggtcagaattgggacatatttaggaacaagatgtccatcaactaatatacacactcattgtactacagacggtattactcggtggcattcccgggatacagcgaagatcctgcgtgctttatcctgatgaggggaaaagtccccgtgccctcatgaggggaacactcgggtgcatcgcccggaggtggagaaatgtcgggcggagagccgtgggagccgtgatcaagtaaggtgttcttataattctcagggattgcgtgctctttgccacttcacgaagaggataaggctaaggatagaagaaagtgaggaaaaaggaagagagcggctgtacaaattctggtaccctgtactttgactacaatccacatgtcccctgatcggagagtctactatgatatgctttgaccatatggtgctcttgagttatcgaggttaaaaaatgatcattaccaggatagaaaggtcaacaagtcataatcattcaattgaggatatgtaggggaaaagccccaagaaaaaataaaaacagcatcggattaaacctcaatgtactcttgacgagggaacccagcgcggaggtatatcacataaaacgccgaaccatcatatccatgtaaaccagcaagacaagatcagaaggaagcaaatgccagctcgtaagcaaaagccaagctcatctttgcatgctgcagcatatgatcgaagctcaaatactcgatcttgtcctcggtagtgtggatcctcttatcggagttctcgaactgagactcgatcacaaatgccgaggggtatccgtaccgactagcagaagcatgatcagagcatgcatagccacactttgtctcgacatagggcacatcgcagtacgtggtgataacctccttaatgaacgcagtaaggccctggtcgacgtagtcgataataacacccacagactccttctcgccagcatcaagagtaccctgaacatacccagtcatgtcttgctggagcatggccttgacgttccgctggttcttcttgtaattagcatatacagcctgtgatccgagtaaaccaccttcctcggcagagtaccagtggaactcgatagtgttacgggcttttccgtgggttatagtctccgaccgcagcagggcgcgaagagcttcgaggatagtaactgttccacttccgtcatcatccgcgcccggggcagccaggatcgaaggcaggaacaagttgatgctatcctggtgggaaccgaggacgacggtgttatccgtctgaccgggaatgcgcgcaataatgctgaactgaccccagggatgagcgaagcgctcgacggttgcaccgtggtcactggcgccagactcgtgcactgcagcagtcacttggtcaaatagccaggttgctgactcgattcccgtttgcgacttgtagtagcgcgtgtggaaggatgtgaagtgttccaggttgcttctcatgttactcttgtcgagagtttcggtcaaaggcagaatttcgtgtgagtgctccatagcccctggatagtggacgacccgcgtggtgtggagggttccgtaggagcctgattggtattcatcggtgacatcgatgaagttcactccgtcctagtcgggggttagtactatgtcattgagtttcgaatcaaaaaaaaaaaaaatggcttaccagcttgagcgaccatttttcttcttcagttacccatcgggttcggtatggggccagttcaatcagagacttcgactgagggttttgaacaattgaaggtgctagaggttgttgctccgggttgactatgaccatggcagatgccgttgcgctgagcgcaagagtgaggaacttcatgataataaggataagcagaataagcagaataagcagggtaagggtcgagagggtttaaggattcttttaaaaggctagaagtgcaggtgttgggcacgcgccctgcgccaagccatttttggaccccgcgcgctaaaacactaaggctctgtatcatattattcttagaccggactgccggtgcatccggttgatcctttaacaatgaaatctctaacacgtacggatcatatcggctcgcaggatcttgttcgagactatcaaacccggggaacaggcacctaaagcacgaaaagcaccaaaagcctagacatgactcggcgagtctggggattgaaggtggagaatgggagaagaaactccactatgacagcgctatgactcacagccatgcggagataaggctcatatgtacacatcatggtgaagactaatataaggatacagagttattgtctacagccttgagctagtgtctactccgtacagcttcgatatttgctccactgtcaggccaactcatattcccaaatagggaactagggctagggctatcaggtgaccaatcaccaccaatcagcgtctggcgagttgtcccgtgcagacaaccttgcgtatcatctgtcccaggtccttatcttgcccattcctatcctatccttatccctctttctcctagacttgttgccttgattagatcatatcgcatacattatggctatccatccacgcctgcgaccagagggttcccagggccacctgtcgccgcaacaagccatagccatctccgcatggacagagcaacatgcagcagcgtccctgcgggatatgaccctatcggactcagcccctgcagcgacaacgccgtctacaccgactccgacgcgttcgggtccgcgcggagtcaccgtctcgctgtcgatccctctcgacgacgacgaagcgatcccgtcccaacgagtcaaggccgagtcccgccctccgacagtcagcttccgacgtcgggagcctctgcgccgggatggcctcaagacccgagaggctctactcaagggtaaagatggcagccgtcggagacagcgctgggagaacggtacgttgtatatgcactagataggtcgcggcgaatgccgacttgtacctttttgcctttggtgcaggtttggcaggcaaatgctgactaggcactaagatcgtctcttgcacaacccctgggcgcaaccgccctcttcaaaggactgggatgtccagcctacctatcctcggcatgacccgatgccttattatcttgcgcccctgtgggacgttcactattcccatgtggtggatcaccagtcggccgcgagggctgctgagagggccaatgagaagcatcaaattccgaaggaactgaggttaaagctgaagcatgcgcgtgccgcgcatggcatgctccgagatctggaagaggaggtccgtacgtttattcaaaagtggaatgaaagggagcttctacttgagaaagagggcttgcgggatgctcctgagtactcgaccagtgatgattcggaagatgagatcgtctttgtcggtcggaatgggcagatgcacgactcgcctgagcgaaaggagagactccgcttgctccgaggggagatcagctctcacagcgagcgagacggtgagaagatggtgctcgagactctggctgatgatcgtgctgctggattcgggtatgttttaagccttccctccaccttattccagtccgctgactcttctcagtcgctggttagtccactccatcgcatcctactatggattgcacacttggtccatcacagtagaagaccgacgagaagcctatgtgggcttccgatccccggttccgggaagccgcgccgggctcgtttcccacccagcttgccattcagaggccctgatcaagcccggcgaggagctccctcggcctctctatgctcaagtgtaaacttccgccttcttgccctttctcttctgtcttccagattggacatatttattggggagtaacgttcgcggatttgtaattcatgttgtctctcggctacaggtggtcatatgtagatctcattggacgtattttctcggtcgcaattcaggtcaagggatatatttcctcgtagcattgatgcaatgttgatcaattgttggtgagtggggactatgggttcatggtgtgttcagttgaatcacagtgaagaatgcgagtgggatctagaaacccccttcgttttcgtgatgcagctgtaagtctgtgcaccgaaactagctgatcatatgtcgtcatgctaaggcccaagacatggctgtgaggagcattagattgatcgcgatcgtacgatgggaagaatgttgaccgtgcagggcgaaccgcgcaggatcggatacctcttcgatatgacatgatattctgaccaagccaaagtatatgtgatcttacgtacaacaggtccctgtgcactcctataccgtcggctatcaccgtctccaccacacaatggatcggaacggaccgtggggcccacggtttccaaggttcccataacgtccagggtattgtatatgtataaagggatgtctctgacaagctggacgttgtgtcctccttgcgtataacgtctcaagaattcccaagtgcttggacgctacagggcccgagccctaacgtaacaaagcagaagtctaatctcttatggagtacaggaatctcgtgtctagactagttcaatgcaggcccccgcaatctcactggctttcggagactaaaaagcaaaaagaagtgcaaagccacgaatgaagacgagagacagggaccaccatacagcacatcgtacgctagagaggagttctcccaccccttataggtagattcgcccatagcccaggatctgtggctgattttcgctttcttttcttttttctttgctttcgatttgtgccacggcctgcgatagtcgggtgcaacggtgtggctctggataaatcgctcgatcgtgtagaacaaagagtcgggtacccaaaaatgacgagttgaacattctccatttccccaatgttctaaatacttcgcacattgtgacagtccagagttctacattctctctgacctagtgttggccggctccaactcctttttctgctttgctcgttcccctcgctggcacattctccccccgattccactatatattttggcttctcaacaaggtagcccccacccctgtcctattccctcaatcatatgattttctttctcgtttcacttgtaccatcctggatgataaccttggagatatcactctaatgtcccttgtcgctgttattctacctcggtgtcccatgagaatctgacccctctttgacttgcggaatcaaccggactatctatccacaggtccaaacgcctggtgtgatcgcttttgctctgatataccctattgggccaaccacaccacctgcggcttacttacggctgatatttgatattactcctggcttcgatccacttgttccacctttttttcgcttatttcactgtaaaccagtggaacacatacatatacatacacaccccacaacccaaatcaacattgcaagcaccatgggctcctataaatcctcccaacctggcagctacagctcgacagacagcacatcttcaaaaagtacgacagcaacgatccacagcgaccgactaacccccaagccacacaaaaccgacgaggccaccaacccagcccccccaaaacacacctacaaatacgaaaccaaaggcgaagtcgtatatgagtgtcgtgagccgcatccccgcgcctcaacctcaacctacgcctccacaacatactccacagccgaacttgacctggagccccaaccagccgagtctgcaagtccccatgaaggtcgctactgcgtaaatgagcggctagaattctatccgctggaggccatcccctcaacgccttcatcctttgcgccgctcttcccttcctcgcggcggctgctcatccgccacgacgatgcaaccgtcgacggcaacatgaacttgcgcgtcggcacgcccgtccacctacgcgacggctcccagcgcgacgtcatcctcttccatttgcgcatgtacgacctcctcgcgcggaagttctcgttccggcggtactgccgggactcgggccgcgaggtgtgcaattccgcaaggcgggaggttgtgcctgctcatgggcgaaggcctgcgctgcgcacctcgtggagtagcgttttcgctgggcttaggcctggttcggccggtggtcattgtccgactgatgagctcaagaggcagcattcaaggcttgggggtggttatggacatggacatcctgcgggggacgaggtagataagggaatgacagaagagaatgagtgggagaaggaaggaaagagcgctttgccgatactcggtgagacgattttgatcgaattctcgaattatgcgcatgtcgagctgcgccgcaaagggcccggctcgaccaagaaatacgagtttgagtattggtccacgaagtaccagtggcggagggaggtccgcaaagagggtgatctgcatgaagtgtcttatttcttggttgacacgcgcaattctaagactattgctcatttggtaccggatacgctggctccgctggaggttgttgaggaggagagcaagggggggtgggtgccaccttcttcattgtggatcagtgatcctgaagtttacaagacgatgcctgatgttgccgagtaagttattctgaacccctgttcgacccctcaaccacttggctagtttctctggttctatccttagctctggatctgtatctttcccctcttttgtctctcttttttttttctttttctgtgatttctacagggggtctgtgtttcgtgtacaatgcaccaacgcatgcaccatgcacaatgtaccatggaacccctgcacaaattgacgagacatgaggctgatgaattggctcgctcttttacagtgtgattgttgcaacagggatagttgcgctagttgacgactgcattcgtcgtcgctggcatcacgagcggcgtccgtcttggatcctgcccgctcagcactcgctggtcaaaagtctggaacgcatgggccctcggcgcctgatcggccaggtactccagcgcagaggatccgcctaagcgatacaggggtcctcggctccacgaccagacaagaatggtgtattatgagatggaccggattgatgagttggtcctgcactagccagggcttggtgctgcctctaatgacttaatgatatgaatgacgcgggatatgaatgttttgttcttgttctagtttagcttcttgtgactgattcctgtcatgcattctattgtctttttttggtattattttattttttttcgctcctcctttttgcctcatcttatttgtttattgacacgggtcatctcggtttcacggcatacggattcgagcagcctgattccgggcgatcctctaatacgggtctgacagggaccaagcaggcttgcagatttgtgcatttttcattgcatggcttggacatagcttacagtttcatctcacatctttcccaatggtctattcctatgctggcgttgcatacatatgtattacgtagagtctgaccgctccaagttgaaccatggttctattttgagctagagctggtctagcttctacgaaccatggttcgagtcacgagctagatgctgtctcgtgcttcattgacctatggatctttggccatatgcatgcacaccctacaccctcattccggactttcctcataatgcaagccataggaaggaatgccagtcttgtttagggcttacgatcgattggccctgaatgaatcttttgtttttagcgcgactaagagcccaaagagcatacccctggccttgctgccttatggaaattcaagaaatagccaatatcaggcccagcatgtatttttagtacgcccgtatactgatttaggacagctactactgtaggtaccaattttgtacgtggtacttatgtagtctactgcgcagcatacatgtatggatgtacctcaaccgatcaagatgtgcggggcaagccccctcgaatccgtaatattttagccgccctataataatgtgctggcctagtgccctaccccatcggctgtttctctacgtgtttcgtgcatactcgatgttagccgcattactgagaaccatggttgaggatattgtcgactctgcatgaatgcccaacacttctccaaagcaaacaccccgtcgctccgactggaacactcggattctctctggacaatcacaaatgaactaacaaatgaacggtcgatgaattcccttcgatggggtctctgcaggcggttaaccggacgggactagccgacaacgtgaaaatgaaccaggggttcttggccgtatctttgttcgagatctctgcaacacacgaactcttgccgcctttctgacgtttctccggaaatgccacccatcccgcctcattccctcgcatcgtcctttttttctcttcatgttgatcctaggcccgacagcaactgttcatgcagggcggcccggtctgtggctttcgaggtgcccagcaactccttccgagtcaacaatgtgcgaaatgcgacttctcacaatcatgatctcatccatcatgatgagctggcaacgctttccagtgcggcccaacttggggggttgaatctacatttcgggcatcctccacatcctcccagacccgaaaaacaattaaacaataaaagctatgacactgacgctgtggccatgggctccgctttttgggcagagaccacccacagctcttttcccccctcatgcagtccctcatggttgttccagaagcccgccgttccgccgatatggttcaagtccatgcgcaaactaatctcgggagattataatgtttccgtcttgccctaaagtacttctgctcaagtgaggcaagcaagaatgagaaaaaagaaaaaaaaaaaaggaaaatccaggaaaatcgcacgcaaatccccccccaaaaatttaacccaacgtggggttctctgagttgttcactttttccatccaatccgggtccaactttcttccgaaaaagggtgttatttattctggatcctagaagaattcgccaatatctccctgtctgtcatagagcgggaactaacttgggaacatccggcgtgcccctcttccttctatagcccttacgtgctgtctagcgtttcttcaagggctgttttttgcttagtcggcgtgcgccgggccgatccaggttgcagcctcaaaatgatccgcatactcttcgccgttccttgactggtggataaggaggggggggatttggctgacgctgtgccatgtccacatcgacatgcataaaccccctcctccgttagtttgacggttaggctcctgtttgttcgaaaataaaatattttaaaaaaaagatgccaaaaaaaagaaatacagaaataaatttcaaaaatacagagagaaaaaaaacccacggggttttctttcctggccttgaagatatggcccactgtttatataactccccgcttcccattgtcgtcctcgtgggaaggttattgaaaatcacatttaagaagacctctagagattccaaacgggtccaattaagatcctgttcgttctatatcttcttgtggttttcccttgaagttcacctcttgtttctccttcgatcttcatcttcaattgggttattcacagacacccatatcctccccactcttcaatcccacttcatatcaccccaactgcaaagcccaacggctctcctgctatcctatctttctaccaagcaacaatgtcctataccaccagtccccaggggaatagtgctggcagccgccccagctggcaggaccagctccagggtaagccattggaatgcgtggtcaagcctcagcagtcccaagtttcacctcaaatgacaggacggcccgactaaaccatcaccagatcattgcacacgcaccaagctatctcctcctgtcttcaacattgtctccgatcggcgaggtacttatccgatttccaatcctcctcctccccctcagtcttcatccaccgtcttcccatgctgcagaccctgattattttatttcccttcttacgcttcgtctcaacacacacgcacatagcgtgcctctatccctgctatgtgtctcgtgtgtgggcattgcaggagggagtggagtcttgcagaaaaagacagagaaaaatgcccccccccttcacttgtacaccgacttttagtttccaagcctttggcagcagaaggctaattacttttatctcggaattgcaggaggtcgtactgcttggtccagtaccgtcaccgttcagggccagaatatcgccgctcgttactggtatgacggtcagtttatcaataatgccaaagaggacgccgccgaggttgccctcaagaccctgaaccagcagcccagagctgctaccgtctaccagggtcagctgttcccgcaggcaacgtcgtccggctatggtcgcggaactggcgggttctgaccgtgtgttctttagctcaaatatttcctactcgtcttgggcggcattctcttcccttcttgtgtttttatcaaattcttttggttcttgattctgacgttgatactgaaccttgttgctcttaatctctgggtgtgtgggtgcttgttctggtttgttttccacctgtgaagggccctcggggatccacaagtcctatccgacacacaaacccatacatttgttgtcgcgttgctctcttacttgcatttctgactgcaggaaaaacccacatcccttcaccgcactcctctcctcccacctctttctcgtgtcgataccgttctcttcccgagcctcgttgatgcatgagcatgcactgtccctcgtcgacctctacctcttcccggtttctgcaggccctgcccacaatggctcactacaatgcagagtccatgtcatgagctctggtgagaggatcaccggcatcagaaagatggacaaataataaaagaggaaaatgcactatgcaccatccctgccccggatggccacttccagatgcaagtcactaccttgtttcgggattgtgaaacctcagcatcagttgtgacacaccacacccgagattccgacggctcaggtacatgatacggtgtctggatgccattaggcctcgtgtgatgcatcgcgaatcggactctcctttggctcttttcagcgcccctccccccacatacgtgtcttttgggggtgcacacacgtattcatttcaagaaacatccacttacgtttttctgcggccaattattgtttctgtctctcccgatttgggttaatacaggtcgcctctcgcactttattcgttccgcttttgttgcgccgtctgccttgagacaagatcggaattgggctagatgcttattaccatttgatgagaggcgagaggcgagagacgagggtcccatgcattgtgccaagtgactgctgtttgtcccttcgaagacatatgacttgtcatgctcgagcgggttcgacgtcatacccgggataatttacaatcgttactcccaactgcgcggttcgaatggcaatcacctgttgcatttgcaatagatgacaccccctgctgcttcgtttctccctggagctatggacgaatgtgtgtttgtctgtgccacggtggatgtgaagcgactcgcctaatcccaagcgcgttgcgacatggcaaatatggtggtggaagctacttggaaaaaggtcacaaggaggagttataggattatcatgggacaaaaattttcattttccgggcatctactttgtctagaatttggggtttcattttgatttgatttacgttctgcctgattattcgatgcgttttgccttgtttttttgtttttctttcctggttcagatcgggtgtctgcgactcacagagggagtttctttggtatctgttgtctcttgttaggctgcgttgggttttggacgttcggacacggaactggaccggggttatctattatattgggactgtaatggtcggggtttgatttgtatcagattgttctcttttgtctcttattatactacagaatatctatcgacagcactttacgggtgaattcttcttcttctcttttactaatgataggtacactgctggagccattgccggctggaacagactcgcccctttctagaaaagggtgctgtacatgcttaccctcgtttgaggtactattgatcaccgcgggttcttgccgcattggcctcccgtccgagcttacacatccgcgggtagcacagcgttggccatgtgtctagccaaacattaatttccgatgcatagcggccgagttgggcagcattccaaatggccgacgctgttcttggataaaatgaattaaataagttgtattaaaagctgatattaatattaatcgcttggcgacgcggagcatctagatatatttctacagtacgttgtagactcgacgttagatgttggtcagttactttggactgaaccatggaacgtcgaactctaataactatcaactctaattgtctattttgaccaactcattgcaggcctcgaatgaactcgaggtgaaagaagagaatctcagtatggattttcttaataattagggctagcgctatgctcggtatgttgcatatcgccacatagaatgcacattgtacaaaccctctgaagagtgatcgccaagactcctgcttgatctagtcgtgacaaaggtcgatctgccatatttgtactcagccttcctcgggcggtggctatgtcgatcaaattatacgggacagcaagtacatatacaatgatttatttcaccgtcgtagtcaatccaacctatctcaaaccaagaagcactttctaaaatacttgagaaatccaaaccatcacactgctatctgtcccattccaagcagataccttccacccaaataccaccatgtgtttcggctcatcgcgaagagagccgcatgactcaccgcccccgcggcggcgcatacaccacagccctgacgcctacagccagtccgcatacaccaaggactacaagagaaacaagcgtcgtgcaggtcagaatgctggtgctgctggaggtggggatggtggaagtggagatggtggcggcgggtgcggctagatctagagggttgggatgggcgtgggatatctttattgatttaatagctgcgattaatattgactacattacttttagggttgatgggatctggaatatgatttgaatttgaaaatctaggcaacgggacattaaactcagccgacatgtacaaatcttgcactttactcagtactccgtaatcgagaattcatacctaatttgtcattaaaagttatctatctattttatgactcagatacgtgcagtccaccttagctcgtgagctgagtcctatcgacagccaccacaacgctccagccttacacatttaatacgcgaaactctttccatctcttgccccgtgtccacggcggttgcgccagccgtagtagagcctcaatagaatgcaaccagatgttacaaagagaagcaatgctgcatttgtccaatggccggtcggatacccgatctttgcttcgtcgcttttgtagatccaaacgccgacgatttggcctggtgcaccaaatgacacgttcagtgcgattgcgagtcctgcgccggccgttgagtttatattggaggatagccagcctagcagaggtgggatgcaggcgaaggcaccgctggctgcgactatgaggcatccgtatcggctctagtgtttgagttagtttatgacgctcattggcttgacgtgcccttgggatgattgggtgacttactagatatgcgctagcagggagaactgcggagacaaggaatcccattgccccgatgaaagagaatatggctgaatggagaccccggctgtaaatgaatatcaggtaagtcctaagtcccttagtatgtctcgatatagaagacgatttacctgttgaagtagtccgcagaccaagccacggttatagtcacgacataggctaccgcgtatggaggcactgtcatcagctgagcacggagatgagagtatcctagtccagcagtgatggcaggcgtgaaaagagaaagactcgagaatggcgttgagatgccgaagtacaccttttatctaattagtcctccagattggcaggggaaaaggtatagagaacataccgcataatgagcgtacaatctccaatccgtcagcgtagccttagcatcctcccaagacatagcatgggcagaacccttagatccttccaaaatcaacctctgcgcagcaagctccttctcttcagcagtgagccaattagcagtctctgggtaatccggcaacacaaaccagaccacaacagcagatgcgcatgatggagcgccctcaataataaacagccatctccaagcagaaaggccatgagcgccattcatatggcccacaccaaatgcaatagccccaccgaatgctccagctagtgttgccgaggcgagaatcaaggctacgcgtatggatcgctcggagttgcggtaccagaatgtaaggtagtatacgaagccggggaagaggccagcttccattacgccgaggagaaatcggagtcctgttacttgggaataggtgtggacgccaccaaggcctattgttgttgcaccccaggagaacatgaggaaggcgatccagcgctggtgtttgttaatggaattgtaataatggataatgtgtttgggttagacgtacacttggacggagcttcttcagaaagtaatttgatggtacttcaaacagtgcatatgcaatcaggaataccatgagtgcaattcttttgtagtcagcgctttggattctcttggtcaatcaatgtttgcgactcacgtgtactgatacgaagtcatattagtttccgagagaagatcattgtgagtgtccgaattcaatattttggcattgcctagatatattagctccaagtctatccgatatttgggaccggaggcataccaacgttagagtgatcaagataacaaagcaagtagattgcagcgcacaagggaacgatgcgtagatcttgtttccagaccaaggccttctcgcgtgcattgagggcatcgtcgacaatttccgtgctggcaagctgcactactgtcagtcttctcaagctcgtataccataacactagtaggttattataataatgggagaagggagaaagatacttctgaagcttgttcaacatctggcatgtatttttcggttgccatttttccaggacttagccacaatcacacagaaaagtcgaagtttcaggaacaaagaaatcagaaaagaccgcagtcctttttttcgccttcttttttccccatgtgatttagcttccccgggcttttgtcccccgggttgttccccgcactagggctactcgcagttcctccgatgcctcaccggtatttcggtattggggtattgggaaatccgatttcgggactagatctagtgttcgaagcgttggtttcttagtctaaaatgatgcttcgtagatattatttaggtgacatttgattggcgtctcttgtttcccctagatccccacatcgaaatctcagggaccgtctaggaccgattccaaaatgaggcaatacaagaagcattgataactaactagcgacaagtaagagttatcattggttttcttagtattgaatagtcttgtaaataatttgtatgttagttaggaaaatacattatctgtgaatcatattgctccgacaaaactaaggtaaaatatctcccacgatagatcagcgcattgaagaacttctcatacaaataagttgaaatacttgcatagagcgcgtgttgtataaaatcaaaagagcctcgggatgcaaacaagacaaacatcttatcagataaaagtgttcccgatcgcatcgcaaacactcaaatcacccctccccatgctatgccgccgtttgctatccaagcgcctcgctaaaacatcagattcagctctatctatatccgtcgcaactatgtcgactaccaccgctcccacccacagatcgatgccctccgcgttaacgtttgatcgtcacgccaaatgctcggtacgtccttgtgataaacatttacaacctagctactgtaacatatatctaatgcatattatggtgcaaatagacaactaaggcccgtgcgagtacccttcaccttcctcacggctcagtgcctctgccgatcttcatgcccgtcgcgacacaagcatctcttaagggcctaacatatgatcagctgcgagagaccgggtgcatgctctgcttgaataatacataccacttaggtctgaagcctggccaggcggtattagatgcagtgggcggagcgcataagctacaaggctgggatcgcaatctcttgaccgatagcggggggtgagatatactaccgtcccctcgcaaatcgatagtatgtactaaccgggtatattgctattcagtttccagatggtgtcacttcttcagttggcgactgtcacagaggaaggagtgcgattccttagcccgcatgacggctcgccaatgtaagtggcttcgctgtaagccctataactgaacatccgaaatactgactttttatcaggttactgactcccgaacactcaatttctctccaaaattccatcggatctgatattatcatgcaattggacgatgtgattgcaaccacttcgccagatcatgctcgtattaaggaggccatggaccgttctgtgcgatggctagatcggtgcattgcggagcataaatatcccgagcgacaaaacctcttttgtatcatccagggtggtctggatcttgaattacgaaaacagtgctgtgaagagatggtagcacgagatactccaggaatcgccatcggaggtctatctggtggtgaggcaaaggaggagttctgcaaagtgtacgtgcctctactttcaccaaaaagaaagaccgaatgaactgaccaaccaaagagtgcatacatgcacggaaatgctgcccgagcataaacccagatacgtcatgggcgtagtatgtcttactgaattggttcttctgccttagctaatgacaaaattagggataccccgaagatattgttgtggcggtggctctcggtgcagatatgtttgactgtgtttggccgacacggacagcggtaagactcaatcaaccctccggtttggttcttgcactgatattaattagcgcttcggtgatgctattgtctcatccggaaccctaaaactaagccataaatcgttcgccgatgactttggtccagttgaggagggctgcacctgcacttgctgtcgtccaactgaccaaggtggtcttgggcttacacgagcatacatgcaccacatcacagccaaggagaccgtcggcgctcatctgtaagtgtggactggccacattatcttatttcggttctaatacttctacagtttgaccatccataatgtccattatatgttgaccatgatggggaaaattcgacaggccataattgatgaccaatacccagctttccttcgcagatttttctccgatatctatagaggcgataaatcaaattatccggagtgggcagtaggtgctctgcggggagttggagtggacctgttggcagattcatgactgcatggccattgattttgatcaaaagaaaagtgctttgaagaaagaaatgagctattcactttatgccatagaaaagcgtgtgtatcaattccaggtgtcaagttgactgaacgtggagcagattccatcaaacttttactaaaaataagacgtcggtcctctaccctagtccaaaactatatcattagacatatatcctaaaagatggccggatatatctgtagaaagtatcattttcgaggcttcagggaagaatatcggtattccttaaagtctcgtgtagatacgcgtgttgattggatactttcctttgaataagtttgcactataaaagacgagatcggcacgtgaccacgtgtcgcggtcgacgcgatccaccgatctccaagatcctccatcgtccacttgatacaagtccgtcaaacatcaagagatcgcctgatagaacgtctctcgctaatttattctgcgccatgactcaagaccaagttgccgcagtccccgcggcatcctcgccgccatctgacccctcgcacgaagagcaccaatacctcaacttaatacgcgcaatcctctccgaaggcgagcataggcccgaccgcaccggcactggcacgcaatcaatcttcgccccaccgcaattgcgcttctctctctcgaagccgaacccagaaggcggcgagccaattcccattttgcctcttctcaccacgaagcgagtctttttacgcgccgtgctcgctgaactactctggttcatctctggctgcacctcgtcactcccactctccgaagccgggattaagatttgggacggaaatggtagtcgagagttcctcgataaatccgggctcggccaccgcgaagaaggcgatctaggacccgtgtatggattccagtggcggcactttggcgccgaatatgtcgacgccaagacggactacaccagtcagggtgtcgaccagctcaaagatgttgtgcacaaactcattcacaaccctttcgatcgccgcatcatcatgagcgcgtggaaccccgctgatctgaaaaagatggccctgcccccgtgccatatgttcgcccagttttacgtctcattcccgcctggcatgaagcttgatgaaaagactggtcgtccatcgaagaagggtaccttgtcctgtctgctctaccagcgctcttgtgatatgggtcttggtgtgcccttcaatatcgcgtcctatgctcttctcacccatatccttgcacacgccgcggatcttcatcccgggactcttattcatactatgggtgatgcccacgtctaccttgaccacgtcgatgcgcttaatgagcagcttgctcgggaaccaacagagttccccgagctgcgtattaagcgtgatgaccggggcagcgcggttgttgatggctggaaggaggatgagtttgaggtcattggatacaagcctcacaaggccatcaaaatgaagatgagcgtttgatttatataggtttctgatttttggttttcgggcactgtccgagtcactgttttgtatgataccaattattccgtgatgtatgccacgggagtatattaaaatagcaatgcgctcaaagtccgggtctacatgtatagcaaatcaactcatgcattgttggatcagaacatgcgtctatatgtaccaagctggcatatgcttcgaaaagcaaaaagcaaaaagcaaaaaagattaaacagagaatgcaagtaaatgcaagtaaatggaaagaaatgcatcatgcgctcccaagaacagcaccagcgccgcgaagcaacacaattgtgtcgccttgctttaccttaccagcaccaatagcctccgagaactcgaggaattccccagactcaacatggaagatccgcaatctcgaattctcctcatcgacccgattattaaaattctgaacccgcaacttcttcgccgcatcatcaagcacacgcccaaccttccacctcgaatcaaagaagaaatccccagccgggggttccgcagcctgcgtctccgccgtaccaacagcatgcaaatacaacctcttctctacaggaaccgaggcatcccccttagccgatcgcttcaacccattaacagcgaccgcacgcgcagctggactattcggcttgggcttcatcttcggcagagccggcaggagagtccccttggcggcagcctgctgcttatcgcggccccaggtgcgtacgcgcgcgaacatagacttgattgtatcgtttggtgaagcgacattggtctggcgcgcgcccagcggggtaatcttggcgcattcgtgttcctcgcgaagacggtgtttcaggcagtattggtggttgcactgggggcagcgcacggcggggtctttgagggtgttaatgagggttttgcactgggtgtgggcgcattggtcggtgttatagatagatggcttttcgggggcggtgcggttctcttggctggtgttgtttcttccgttgcgacggcgggcccattcgccttcgcgagggcactggtgcgcggtttcggtccggtgatctagacagaatgtgctgtggcaggattcgcaccggaaggggaggaagtcaagttggccgcagtactcgtattggcagtgccggcctagggattccaggtctgtgtcggccatttgcgtgaaggtttcgtttgggtccctggaggggctgcgccctttggatacggttatagggggcattattatgcttggtctttggaattggggatatgacacaggaaccgaaggagaatgatgcgtgggatagactagggattcgagtatgcgatctgatagaacgcgatggcacaatcgccatgtgactaatgtggggaaggttctgggcttatctagatacggagttaagttcggagttagttagtccatggaatgaacgcatcagtatgaacagggaagatctggcaagatacgagttatctcgccagcctgcgaccgtcgagatagtcgttgcagagcgaagcgactgatgatcacatgatggcccattagaacgctattatttctgagaaaacttggccacgtgacacgtacatgagaccttttgatttatacttgcttcgcaattaggagaaatatcaatgatttcaatttcttttatgaattcaagttcatcaggctccacagtcggaagaaatccccggatgggcttcttgacttaaagctactctatgttgtatgtatatatcagagttcgcgtgtggacatatcatgaaatattcgccattgacaaatgccaaattccaaagaggatagttacacggcatacaacgcatattgtaatagaaataggctagttatgctcagaaacccagtgacatatcaccccgaaccggtgtcggtactctcaaagtggaactgtcgaggaaatcctatttgatctacctgctggtgtattggtgcccagtgaagaccacacagaaatatcacttgaaatcaatctttaatgccaaaatcttggcttttaatactgaaaatattcggtgtatcatactatctgtaggcatggttcgagcaacatcgaatgtgacggttatagtcattaacactaagtagtgaaagagcctaccaaggtatgtagagtgactacggtatgtagaagtggagatatatggcgatgcatagcacccgggaattcttatctgtgacgatcatgtctatttattggagaacctgatacatttgggcgttcgctattctcttaaatgcttctcctagtttctagaggaggaaatcttagtatctttgttcacatgaagctatttagaaggcttgacggcagtagctagatcattatcttccatctatctcacacagctctcatattggttgatcacccctcattcttcagatacattgattgtactctgtacgtgcatcagaaatacgggaaaaccttttttcgaggtattgttaagctttcatgcagtcggtgcctccaaggctgtttcgcctatatttttctagttgcaattaggccagggaaatgaagacattcccacttgcttttttatagacgatcgactagtaatgtactactactcttactagcgaagctgtactaaatagtaacggacaggccggaactcttttcactgcctggttttgaaggcgaacggaaaccccactctgcagaagtcggtgaaaacaagagaaaaactcatcagatatcatagtgtaagtcaatatcgagatcgggacaatgcggggagggaccatacattagagaccatttagggcaagcatacgcgttgtcctagacatcctcgtatgcctcgaggggtacggatgtacaactcgaacttctagaatctcgtccctgagttataaggtcgatcaccgcgcggcgatctcaccaatcaccggcccgtatccagcaccggcggccggcccggttggcactgtgattggttcggatggccgaggcgttgtctttttcaggcgatctataaatgttgatgcttgatttctcgataagatgttggcattacattatagaatacgtgctggggatataactatggaggggtttcttcttccgttcactctttttttcttccccctgctttcatttccagtgcagtctcgcaaccctaactcgtttacttgatcagtgttttcccacagtaagttgtctcatggaatgccccgcgttggatttattcggtctaacagtgccaggccagttagattgcagctctaccaaaccttgcccggtcctgtctatagaccacgaacccaagactgccagacggtcacgaacggatgatatagcattgcccgcttaaaccatacatcataaaccatgacgcagcaaatccaagagcaggctatgccattccgtatccagcacactagaagccggatggcagaactactggcggccgatgtactcgttgctgcaggttcagcaacactgattacgccagcagtcatgatttttgataggtaagccaagttagactccatcttatcaacgtacgtacgttaaccaatataacccagactcgttgtcgagaaatcattctataaccaacctcttttcccggcattccgcagacacctctggttttccctcacacaacctgcaactttcttaacatcacgacccagtctcctcgtctggtccctttacacggcaacctttgccaccgccaatgcttcagagacaattctgagcaagtggtaccctcagattgaccatgccatctcaggcatgaccaccttcgctgcaacattcatagtcaactcctctgtgggcatttggaaggatgtgaagttcgcacaattattcggccacagcaacacctctataccagttacaaacaacacaaccccaccaaggacgactccaattaccacctccacctccacctccacctccaatacaagctcaacccctaaaacggcccgctcaatcggccgtaccagaattcccgtagcaacatactcagccttcctcgtccgggacgccctcacaatctttggctccttcagtctccctgctatggtctcggcctccattccggactccatcgcctcccaagaatacctcaagattttgatcgcgcagctcgcgattccagcgtccatccaacttatcagcacgccaatccacctcctcggcctggatctctacaaccggccacaggtaatgccgaccaaagagcggatcaaccgtatcagtcgcgactggattagctcgtcgctgctgcgcatgtgtcgcattatccccgctttcggaattggcgggttcgtcaatactgagggccggctttacttgcatgatcaagttagtggtcggcggaaggggccttgaggaccttatatatacagatacagattcatagataaatataccctttcttttctctttctacttccactttcaaatgctcaacggtcttgtgtgtgctttatccgctatcagtcttccccactcccgatatcaccgggccggttggttgtaggcgcttcatctcgggtcggcaagcgtcacaaacgtcaattttagactttctgactggggttgttaattttgggcgagaaatgttattgcatcactcgcctcgaagactggctgccgatgttggttgaaatataccgctgatttgactgcacggcctaaaatgatgtgttattcttttttagggcttttttcgcagatggcatgtggttatgtctgcaaacacgaatttcgtaaaagagaatgcaaagtccaaagtcaagaatcaaaatccactataaattgccttgctttatattcattggcgctatggttgtccacactcgcctgacaaagcaaatgctctgtgacggcaaagtcataggtcaaccaacctattgtgagtttatgcggtgcaaccttcttacgcccatatagaaagacgactggctttacatatgttatgatatatctccctatacatcaacactcattgggcacttttccgagtcgaagaaattaaattagaccttatcagaaggctcggcatgtttcaaaagtagcctcacagcctatggtattccgatatgtttatctctaccggagaaatataaatactagtttcttctgggcttgcttgaggagaatcctagcatgctcaaagaacattcgctttctatgcggccaatttgttcgctctcggtacttcagaggaatgactcaatgtaagcgggccagcgcagggtattccatggctgttttccgatgcctaaacttggaagccaaagcctgaacgacagccgcaaagcgaattctggtcggtgcgtcattgttggagacggatgagtgagatcacttcacccacagatggatattatcgcactgctgtggatttatctcaagttggctatctggcatggcggaggaatttgatagaagtatgaatacaagcaagctcatctaacgtcgctgtcaatggcctcagttccagacgcacggcctttggatgccgagctggtagccgaagagtcggcatggctgaaatcgtgcaaggcatggcacgggtcaacaaaagatgggtactgcccaccggcagcgttgaaagacgacggtctccacatatgctggtgagcgatattgaccagtttgccgaggaccgcaatttcgagttttagcttgatgctgtaaagtgtggctttgagggtcgtttgatagatatagaagttcctaaactcgataatcatcaaggcgatatccatcaggatacaagatacgttgacggcgagcagctgcaggatagtcttacgactgatatggtcctgatttaagcgcagcatgcgattcgtctcccacatgtacaacccagatatgataacctcctgcacacagaagcccgtcagctgcaacttctccatgacatcgtacccggcaaccgaggccgcagaactggagaagttggccgcgtacgtgaggacggttgtgggcacgtgcagcaggaaaatattcgtgatgatcatggttttcaccatacgcagcacgcgcatgttctgaatcaccagatggaggcgcgaatacagcacgaatgattggccggttaccatggcccaccaaccgactgttaagagcgtgacgggcacccaagtggcagatgtcagattaaagaatttgagcaggtagccgaccgaatatggtaggattccaacgctggctatcagcatgctccaaaaataggcgccttcatagcgtttgaaggttaggaaaatgagcacgactagctcaatcacgttgtaccatgcgacgctgatgaatgttgcgatggtgatacggacgccaatactgtcgcctgtataactgccagtgatccagttccctggactggagttgctgagagaggacatgtcctcattgggaagatctaatatgggaagaagagagcacacggaccgtgaagtgacgtgttttggggtttttttctttggcggggttgctcctaatttattggaggctggcaggcttttccgtcctggccccaaggggtgccaagtgggccaaatgtaatagttggaatttattttaataagatcaacatcaacaattcgtactagatgtgacccacttgtcgtgttccttgatgcgaggggtcatgataatattgtatacggagtacggatactgtattttcctcttgatttacttcaacctgaggcggaagctgttatacgttagatttatcattccagtcttcctccagtccggaagaatttcaagtctagaacctctgccatgggactctccctgccgttactgccggcattcagtcacatcactgcgtcacccataccagatctgactgtgctggaagattgagcctccccatgtatgctcctagcataagcccgatcctcttcacggcaaagataacttggcataacaccgacctcttgtgctggcttcttcaagcctcgcatcattttcagatcataatgatttcgctcggtccgcaaaagccctaagccccttgtgacaacatcacctctctctaaaaaacgaagctcgcattatccggttgacttcacttcgcggtgaccatcgcctcgcacttggtcttctgcgtcgtaaaagacaagattggctctttgagcaaggcatgcgggacaggccagacggcagtagatcagatgaatttgacaccgtgggaaggagtgcgatgtgtatgggcgcgatcatgggaatttcataattaatcgggtttgatcaatgtcaaagtgaatgtcgatggactattttgcgctggaatgtacctaggaataggatggcgtttacccgggacctcgggaagcccccaggtcctcatttttacgagaatgcggaggtggcgtagttaccgtatttgataggtagacaggggccaatctgatagtatgtggccttgtattacagtggacatcacatattattattgaacgcgtggttgattctgtgtagtgaagtgtagaggagtatggactacatagtagtgttgaggactttgatcagccgtccaaacattagtacattagtactagaggtactctgtaccagaggaagcaagcattttggcgcttttttactttcaaactctgaactatatcaaaacaccaaggagaagctaaccttctgatttctaggttgacctgctggtggctgctatctatacaacatcaacaaattcaaagatatgctaatgatatagagacgctctatcaagttctatacttaatatggctatgatgctatgatgcatgataaatggatatagacttcaaccaatcaaggctacttaaaagcgagcgaaccaatcatatattggcgtcgttaaagattaactccgagatagctccacccaaggtcgcaaggatatggaaatccattgagtcttgagattagttcctttattccttcctcaactaactatagatatgcatgagtgtgtcccattagcccgtaaaaaggccaaaacaggctgcaagacttgcaagtaagtatatgtccatcctcattctagcactctcttaaccggatcaagaatccgccgggtcaaatgtgacgaaggccgaccagcttgccgacgatgtgtatcgactagtcgggtctgcgacggctatggtatatggggaggaggtggaagtccttacgggcagccacagagcaaccgaactctatcaacctactgcacaccagtcccagccggcaacctcagccacgaggaacagctgtgctttgactggctgattcaacgaacagcaaagaagttcgccggtttattcccatctgacttctgggagaccttggtttttcaagctagcgggcaggaacccgccgtgcgtcacgctgtcattgccttgtcgtctgcgcatcgtttccaacagcgattcgccgccgcgccagataaatatgacgaagagtgtttcactcttcagcaatataacaaggcaattcaacacctacgcaacaatgcaaccgacaatagctattctctccgagtagcgctgattacgtgtatgctctttatcaccctagaatacatgcgcgggcagtatacagtggggaatgcacatctccaatatgggataaagctccttctcgatatatccgcgccacgtccaccgtcatccatggttccgaccgttttgtctcccgaagaagatttcgcctacaacgccctggtcgacgcctatgtccgattaagcattcaatcagccatgttcgggcccgtgcctttatacgtgtatcttgtaacaaaagacccgcaaaccaccagtcttccctatacattcaactcgcttctagacgcaagacgcagcctagacgacctcttgaacagaatacactgtctaaaaaagcattaccacgactactacgcatcccagacaccaactagcgaccaacaaatgctcaatacacagagcataatcatttcagacctatccctttggcgtaaaacatacaatgtctcagtcgcacggctcgaatccaacaaaatatcagaaagagaccaaaccagctatctcctcctacggttgcaccacgaaatggccacaataatggcctcagtctgcctctcaccagaagaaaccgaatcagagctgatatttgacacatacaccgataactttatcaggataatgactggctttgtcgatatatggaaaagctggacaacagcagccttcagcgaagaagatctctctaaactagccaccggacccgacgacctgaaagccatctttcacaatttcaagacgatgtccgacatgaacacgattctggaaacttctctactagagctcctcgaaaaggcgtctacagtcaaccacttcctccaagcaccagactgtggtaagagtgggttcaccgttgagatggggtacatcccgcctgtatactacacggctcttaagtgccgtgttccgcggatccggcgccaggctatgagggcattgagggctgcgccgcatcgagagggggtttggaatggctcgattttggcgaatgttttggaggagattattaaggttgaagagggggacttttatgctggcgatgtctgcgtcaattcgtctgttggacatattctgcctggggaagaggatttgcttgtaccgaaggtgccagccgaggcaagagtctcagatgttagagttctcctgccggatgatgttgctgggaatacttatgttagctatcggaagagggctgggggaggcgagtgggtgacttttaagcagaagatcggtatatagggggcgcgatatgctccattttgatcatcatctttcattgtttattgtacaaagtttatatcagccgtgggtcgtgatttcgtaacatgcttttcagtatccataacaccccaaaaatcccgtttcctactgttccaaattcataatgactgaagtcttatgccttgcatactgtattacttcccgcctaccttttgactccgcaaaaatgcagccacctgctcatgtcttgtgacaaaaaacatgcgcttccgatctgacttccaaaccagcacgccaatctccgcggcatactggcagggagcctggtattcagtcaagctggtgaaatccttgaacaaaaagcccgccgtagcccggagacggtcccgctccaactgccataatctgatctgatctgtcacagtaggcgggagcacagatgccgggacacccttgccgttggattgagcagcgctgtgtttccgcagctgtgggtgcgcgtgcgataataggtaagagataatttgatcggccgtgattcccatctcgattgctcggcggacagactgcctggtgattttgccagtgaccagattggggaagcggtatttgaggtttgtgaaaagggagatgagagatatttgtaggggtgatgaggtgtaggcgtagagccgatagttagtttcgatgatgatgaaaccggagctagaaccaccagacggccccactggcccagtgagggatcctgtgacaggattgctcagagcgctcgagtcggatgtaagtgtagttgccagacgggtgggataaaagcgtgttgcgtcggcatcttcctggtagacaataccaaaatcagccaggtccgcgagagtgcgaagttggttgggtgtcatgtggctcttgtcgtaagaagatccgagttctagactgctcaggaggaataggaacgagagaacctcgacgctatccatgccgatggcctcggcgctctcgacatacagaatcaagatatgccagacctgggtattcacatcctgaagcacaaatccgaacccgtctttggtgatatcgacacggttacctcggatctcaaccaagtgtcccgcttggagaagctgtttgacacccttgctcaaattgaccgtgtcacgctgtccactcatcaaggcactcgttccaaccatgtatcccataacaccttcccactgtcgtctagcatattcatccaaatcggcaatcgaggttggggtttgttctggagcttgggagaatacaccgaaagaatgagagtcctcggcacccatcagagcttgtcgaagcgaagcagcgaacgggttggtgaccatgtacgcacggacgttttcacctgtgagggtcgtagaaagaatgtgaagtcgacccaatattgaaagcgcattatctcgttcccttgtgtgaacactgtcagtaatggctagagcaagacctgtcagataagccactcacttcttgctctctgcgttgacccaaacttccagatcagcagttgggagagggtctttcagatagagtagagccatcacaaagcattttgctatattcagtgttagcacaacgttcccttccgtgtgagtaagcttaatgtacccagatcgggcagcatgcgccggaagatcgcaagggctgtggatggttgttggtatagcttatagaaagtcgtcccggggagtccctccaggtactccagaggacgggatgttgcactcgccatagtgagctgtgagaaaccaaattcccaggcaactgaagagaataaggtgcctatgtgaagttgttgaatgaaatgacgctagtacggtggccgaagcggccataagtgcagctccgggatgcccccgagtcaagtactggacttgttgaccctccctgtatcatttctttccatatccagcccatttatcacttctgagaaatggcttctctgagatttgttcgctcggtaatttttcaaccttcactacctatcattcactcttgttaatgcatatctatctataggtgtgggagtccttccgagctacctcgggtctggagcctcggtatggaaatcgtcccaacttgcctctacctttgagatatcagagaagaactaacgtcccacttcaattcgattaaaggctgttgagtaatgtgagtatgcgccagtttcccaaaggttacattgaacttatcactgacctctaccatagctccgtattacagccgccaggcccggtgtagtgaactttgagctggatattcagaaggagcatacagtatgtctcgatgtgctgcagtctctctagcgcatgtctctgggaatttttctcgggactcaacttctcacatggaatgcctctgacactttcagaaccgcctgaatatcctccatggaggcactattgcaagcatgggtaagagatccttgcatgtgatcccaaagttgtgatgcttggctaaaatatgctctagtcgatctcggaggctcgttggctgtggcatctcgcggcttgttctcgacgggcgtctcaacggacctgaatggtacgtttatgaaataggcatgcatcccacctatcttctctgtttctaataaatcctctcaagtcacatatttgaactcaggtggcagagttggtgaccgaatcatggccgtatgtctttctccatctatcccgatcagtctctcaatcctactaaacgggtactaactttgacgttaggaggtgacttgtgataaatgtatactacttgacttcttcgtcacaccccctcttctacttgataatggccatcaactaactagccgcgcttagttggcaagacccttgctttcacgaacatcaagttcacgaaccccgacggacatgtctttgcccgcgggagccacacaaagtgtgtatcttatcttatttccgattgtaaactgctaatgtcgcttaggtacgtagcccaggcttggaaggatcctaataactttgtggaggaaatgaacaagcacaagggccaataagaacgaaattgggtattacgatgagaccggagcgttttggtcccaagtcttacattctatgtacttcaagccattgagaaagacatccggagaaaagatcagtcggcattgcagcagcaaatccgagtcgtcagaattatagaagacaacaagtctgttcatatccccaaatgataccactctgcttgagaccagaaatcttacgcaagctcattgcgtgttactatgcagtagctaaccatttaatctgtaaattgaactgctcattggagacgccccccagagtacaaaagaagccgagaaagtgaggtggtctcaacaaactcctttattgagcgctgctgttaccatttaacttatgaaacaattcatacaagatcttcatccccatcatcatcagcccccatagcctcatcctcatccaaatagtcatcttcgccagccggtgccgcatcctcaatggtgatatccccatcacccatagccttaatcttggcctgcgtcatctcgaagacatattgtccaaggtgctcaacactctccattggcgtaccctcaatggtggcgttagcttcccgcgacgaagggaacatctcgccaggagcaagcatgagcttatccggtcgttgcaaaagaaggtcgaatgcgggtttaagttcgtagcacgattcgaagacttcccgtcggccgaggatatacagacccagtcgtgcgcgcgagagagctacagtcaaacggcggacgtcgcgtagatatccgacgctgcgggttcgggtgagagaaaggatgacgtctagaaaaatgttagcaattccaatattccgagtgatgtgaatatgcttctgggggaagtcaactcacaatcattctgctctccctggtagcgatccaccgtcgtcacaatcttgggcattccaaacatatggttctttccacagcggtgactcaatacatcccgaatcagagcagtttgcccagcatatgtggctaagatcgagattttagaagcagggtagcccaagagtcgcatgtactgatacatggccactgcgtactccgcttcgcccaaattctggataaagtggggtgttggctcccgctctccagagccctggtagtcgggcacattgataaattggtagtcgaactggaaaccagcattggcctgctggtactcgggggcactttcaaccactggaagatccccgagttccttgtaccgccagcggaagagctctgcaatgctaggtcgtgcgcgtccctgcttatccaagttgatcactgggacacccaaccgcgccagtcgcaagaagagactttgctcgaaatgggcatattgacggaaacccatattctgaatgatgggtgaattctggtggtgatcaccacagagaacaacacgcttgagaggaagttcgccgtttttcgtattttgcagagcgttgggaatgaaactctcaacttcagtaatctgcgcggcttcttccatgaccacgttgtcgtagtggaatcctagatcggcaatttcttgccggcgcatagctgcatgagtcgaggtcatcgcgataattcgggcctcctttatgaggagatagttcgctttgtcgcgaggttgtcttaggatctcgaagggccggatgtcttccaactcagagaagattcgggcaatgtggcgttcgcaacctgcagcagtatcgatgatcgcctccttcgaggcttcagcttcaaatatgggctggggggcatttgcgaagtatgattggaacgggaaggatgtaacaatctcttcatttgatattccttcggagttggctcgatcccagaatttggcccatgttggctgcacgtaaactgtattgaagtagcctgcagtctcgcatgagtttccatgcgcaccctcgaccccaagcgatgctgccaagcgcatcacttctgataaatagtgattacggttgtcaaggaaggattcgactcgtccatacttgctgtagttggaatcagtgtccaattcttcctcgccgtgacccagtcgcaacaagtgccgttcatcaatgtcaagggcgataattttctggaataattgattgagggcttggttgctgtgtgcaatgagtagcgtccgttcgttggggaagttgtggtaaatgttgttaattatttgagtggtgacatcagtctttccagtaccaggcggtcccacgatgacggtgagtccaggctgggttccagatgctatggcttccacttgggcgggtgtgaatcggattttgttcaatttgggggtgtcgacggggtaggggccagggtttggtggcttgtatgtagaaacacgcatattgctaggcgccaactctgtcgctgcagctttttcccggcgtcgcttcttcggcgcgtggggctcttctgcaggctcttggttaacatattcaagaacgtagggtggaccaaagctagcattctcagcccccgaaggttcaatgcccgggaagctttccactaaatgggaccagtccaaaagggtgtctctaaagtcaacagtgctaagtcggtttggcagctgtgtgtattgagcactagcgggatctccatagcccaggaagatgtcctggagccaggaaggaagagtcatatcagagacaataagcttttgcatcgtctgcaggattgacttgaagttattctctctgccctttctccgtgcaatcacgttaatgagggggtaaatgtctggtttgccgtgggcctgctggtccttgtcggctttgaatgcagccgcatccaagttgacaattaatctcctcgatcgtgccctaggatgagagccatttgcctggccagaatgttgtcgcaatgcgcggccttgctcgtcaagtacttgtacaatctcggccgttcgaagatgggtcatccgaggggcttcaggtgcaccttgttccgactgtgacgagctggactggacggccagaagataaacgacgtcatcaggtcggagtgtgtcccactctcttctaacattatctgcaagccttcctacctctatcgcgatctcagctcgaacaaaagccggatttgttgccccgaccttgggtggtgcgacatcaataatagcaggctttgaaatcgggatggccattcgagagaatccctcaaaatttaaggttccatcgcgtgctgccttcggctgcatgcgtttaacgagggactccaggtccttgcggatttggaaaaatgcttctgatcggtagagaaggaaggagcgataaaggaaatctccgagactcagatactggagattcaactttgggattgccagaggcctcgatccgtcgtatgtctcattcctcaacaaggccgggtcatagagggtttcctccgtcggaagtggactcaacttctcgacagcttcttggaaaggcaccttgcgttcataaaaagatgccaaaacttccagataaaactgacggtctagagtgacgtccgaggattttgggtagcttgttcggaatcctaggtgagagcaaaggctctggagttccgactcgtctagagcagatagctgtccctctagatccactcgctgcgcaatcgagcccatattggagagcgcgagaatcatgagcttatctttgaataatttcattgaggatctttgcagctgggccaattcctggcaatgcaggtcgtaaactccctgcggagaaagagcctcaccagagtaatcatcaattgcaaattcgacaaaatgtttcagaagactgtggaagtcacgtagaagggcgttgtcgggcacatggtagagctgcgaaaggcgaataaccgatagaaggttgaggtcctttaacaacgtgttcacgtagcgcctagtgggaagctgactttcgagatcaaccaagagctcaaggaaacgctcacagtacagcaagttctcagtctggtccttttcgggtccgttcaacctacgaaggaaatccaaaagcattgtatatagccatgaacgttcgaagcgcatcttcgctttcaccgcttcatctccagcctcgtatcgcttcccagaggccctccacgccttttttaatgtcggggcctttgcaataatacgatctctagtctcctcactggccaagttgtgccagatcgagatagaaacgaggggcgcgcattccttgcggattaggacgttctcgagtgactgaaaggcgctgattataaacgatatgatagagagtcgagagcgagtcggaagtgaatgatcaatgctcattgagagaatacggtggaagagattggagaagtcatcagcacggtcggagaagatatctgcaactgtcagcatcgtcacgttatagatctcgtcgtattgactcaccccatatcggtaagtgctcgcgatgttttacactgacgatcaatgcaatcaacagtacgtgatgattcgacgcatcctctgtgtaagtcggccaaaggaacctcgagaacagttagcgttagccttggaggcatgactagagaggaacgtacttttcaagaatgttcaagttctcaagaatcaatagcgagtgactgttgaaagcctctgcttccaaaggatcccacaattgcttcttgatgacatctggtttagccttgcggaccttcgtgttgagccagtgggccttggctagctgcacccacgggttttcttcacgaaagtccaccactgtaggcctggattcgagactctgcgccatcgcaggagtcagtagtttccttaacctaataaattggagtggtcaaggaggggttgattggcgcagtcgggaacatctgcatcggtgaagctggggggagcttttcaaaaagtcttggctctgagttccgccgagccgcagtcctcaatcaatccgaccactttgtttcccttcttcctacattcatctaaccttttttcttcccttcgtaacctctcttcaaagaacgactgaggagaacccttgaaaagaagctgaagaccgcaatcaaggaagtcccaaggtcctagaagacactcgacaaggcgcctacggacacgctcgagacaacacttcaagacaacccctcaagggccccttacaaaggcgcctgggtagacgcttcaggaaatggcgaacgatgatattggtggtgttcaggtctacaaaagactagtggacaatctcctggatcgcgccgcgcaggtcaagcccgacaagcagatcgaaccccccttgaccgaaacatacctgggcgaatcgatatggcaagtgccgtctgaggatgacaaggttacaaagcacttaagcccacagactaagcttgcggccgtggaaatcgcgtttcgcgagaagttctatcgcgttttggtacggcccgtacaaagctctagcccccagggcatcgttaacagtttgttataggcctcgacttccatcggtgaccctgctttcattcaaatatggaatctccttgacattgtctcgatattttctgataatggtcagtctccgcagttcctccgcagtccctaccgatctaacaatcaccagaacaatgcgaacccggtctgattttctggctcattgaagagctcttggatagtcaaactatccatggctgccgtaaggtgtttgattacttggagtcccgaagagagaggaacaccaaggtcagcatggcccctcatctactggatctgttgcaaagctgaccccgcacaagaaacatttcaaacagaaaagcttagttattctacgatcatgcaacgagcttcttcgccggctctcgcgcgcagaagatacagtgttttgcggccgggtgtttatctatctcttccagagtttcccacttggagacaagagttcggttaaccttcgcggcgagttccactctgagaatgtcacggcctttgacggaattgcaaatgagtctaccgataagcaggagcaggatacaacgatgactgaaggggctgaacccacggcacccggacaggcagcggttgagacctcttctcagcaaacatcgaaagcgcccaaggtcgttgtttctactggcgatgagaagaaatcagatgaagttgacttgaatgcactctacccgctcttctggagccttcaggcctatttctccgcaccgagcaagacgttcgacgctgaacggtttacatcatttaagactggaatggaagctacgctagctgcattcaagagcatcaatactgagatggaaaacgagagctctgcccgagcatcagaagatgcccgcaagtcgaacaagcgcaagcgcatcgcggatggtactgaagtcgccaccagtttcaacccgaagtacttgaccagccgggatctatttgacctcgaaatcagcgatactgccttccgacgacatgttcttgtccaggctctcattcttctcgactttgtgctttctctcacatcaaattccaaatcacgcctggcgaatacgacgaacaagtccgttctttacggtttcacattgaacgaggaggataccaagtgggcgaccagcatgcgaaaaaacatcgaggaatatttgcaacaagggcccggagggaaattctattatcgtatggtggacacagtcttgtctcgagacaagaactgggtgcggtggaaagccgagggctgtccattgattgaacgattggccatctcggcggcggagtacaaggcttcccgcgagcatgctaccaaagcgtatgccaacaaacgccttcgtccgtccccaatgggctctctcgatttgaagttccttgccgacaccgaggcgctggccaatattgaacgtctcaaggaatccgaccgatacaacgttccttccgccgactcgttcttgaagggcatcatggatgatgaaatggacatcgatatggcgatgactgacgaggacaaggcgattgccgagggcgctaaagccagcaagtcctggcgaatcttgcgtcttgctgcgaaaggaaagcttgctgcattcgacaaaattggagagggcaacaacctacaggtcttgtttgagagtgctacaaccgcggatgatcacaatgagctcagttcctccggcgataccaaggatatctcccaatccctcgatggagctcagagcctgcctcttggaaccaaagggctcaccgaagcgaccaagactgctggatccgaagagcctgttgaaggcaaagtcgagacagctcaggatcttcacgatctgccccagggcacagatgaacgggaaatgcaagtcgaaaacaaagacgtcatcagggaacaacaagacccaagcaccgataacaccagggaagaggcccttgccgccgctagcgcctcgagagaggactctgccacgtaaggtcagattgtggcttgaagatattccgttggatagtcaatggcttggaccccctttttgtccggagaaaatcctccaatggacaccatctaaggcggtcacgccgcggccaaccacatccagattatccaggcaacctgcaggattttatgcatcaatatcacgaagccgttggtgccatgatctgggagcgagattaccacatccgtgcacctgcattatctgcgatacatctgctggtacggttcagcacttggtttctctttttcaaatacgaattacggagtgcgtcctaggtcatccctgctggcggagttgaatcttcctctaccctaattgggtgtcatttcacgagcttcttttttcttttttctttttatttcaagaacccgcctattcagggtcgccctcggtccagattcgtcggggcagaattgacaaagatggcgcttaaacagaaacagaaaaagaaccaattaggcccattggctgattgcgggcacgactcctgaaccgaatccggcattctacgggcagcgggccaatgacatacgacctaactatgttgtacccaagactaaagacctcgatgaattagctaacgtggagaccatctgggcacaattcttttgatcggcaactctaatacaaatgacttgaaagggttcctgcatgaagtacggagcagctaaagtagaaaaaggaataatcgtgttctgtccatgttctccagacctcatttattttcacacgtggcatgtttagtgtcacggtcatgtttcactttttttctatttttctatttttctatttttctatttatctttttatctttttatgtatgagaaagcagggggtaaggattaagcgacttcggaaacgagatcagtagggaaaaaaaggagagaatatggagtacggagtaaatatccaggattacggagtacattgtacacgagatcacaaaagcaaagtgtccccattgaaccattacatgcagaagtgggcaccatgtttctcccctgtccacttgggtttggccccctatttttcgcgagcctagggaagaatccttcgcttcgacggagtagtttgcgatatagtacactatattggcgaatagcgtgcactgatcgtctagcgttcgatgcgcaacacgtataagttgtgcaatcaataaatcccaagaataaaagccacatgggaattggaacactatcgacacaagcgttgagtttggtctccaccagtggaggctatacaagagatagaaggggacgtacaataacggtagccatgtggttcgatctgatgcactggccatgtgggtatgggacggaggacggagtatggatgtaccgacgagtgtgctggacataaaatccgtgtctatcttcgttctaatccggtttaggcaaatgttgatgttctttctagatcgggaattgtacagatatatatatataggtataggtgtatgtacatggacgtgcggaggcactcacatactcgttctattctatataggttctatccctattttatatgttgccagaaataccctgtatactcgtatactcgtatattcgtatactccgttatggaatccgccaagagatcgacttgcgtcaccttaatcttctaaagtccgatggtataatacccaggacgtgtaagtatgcatcccctgtacgagtacgtggcttgctactccagtgtacggagtacggagtataagtggatggatgcaatgcctcggtacggaagagataaagtcaaatgcctcgatcgctcgatctggttaccccgcacagcacgttccagaagggagattgcaaggacgtacacatcatacgttgcaacggtatgatcttgatctttcctttaatttgaatttggccgtcagggttcaacacgaaacaaatcaagcagaaacaaattggcctacgtagagatcgtcactccgtggtgtggatcgaaatccaacggctccgagttttctcctccgagatccacctgcttggggaacctaagcggtatgtaacttatccgtacccttgatatacatgatatacaccgcgtacagggaggcaggcgctggatatcttcgaagaaggaaaaccgagaaacccgagaaaccgatgccccaggtcctatccgatatatccgatgtccttcggcagaagtcctgacccacatggatctctagaaaacgaaaagatgtatcattgacgagtaccgttgacgcctcatttcacctgcgactcgaattgtttcatatccattgtggagatttccaggggagctgtgtgtctccctacaactaccgggtggtatatcctcgctaaaaaactccttaactaggtatgtaattccgagttcccgaatgcgacggcgcaaggcccgcttggtggtctttcctgaagaaggtaatgcagctctcgaaacttccttgacgaggctcttccaaaggctatcgtacaccgtttcaagtattgctcatgtggttctacattggttcctttgactcgggcagtcctgatttgcgatgttgatgctccttatatagagattgtgtgtttgagagtcccctttttcccgttttgccaatttcctatttttatttttttcccattctccaagccttttgggcgctatctccacccagccctcgactgcttcgcttctttccgaggcatttcacgatggagctgtggcgggcagcccgctgagtggctgttcctcttggtccttgatcgatagccccgagggtccgctcaggatttatggatcttcagcacgccactaacacagccgactggcccttcccacatggcctggtctgcgcatttccggtgagggtcttacatctgtactccgtaacggttgcaggaatcaggctttttgtttgaactctctcgtctgtccgacggattacggagtatacagatcccagctaagcttccacggccaattccaaacttttatactagaaacgaaaaggacatacaagtaccgcactgtctcttctctctcctttatcttcccttagtttcgcttttccgggtgccgggtcccgcgggacccattttctcccctttatcgtccaaggttgagctgagttgacgtggtggttcccagccttgcaacttggacgattcccacattcccaccacatgaatcctggtcgctcggcggtgtccgttatggtgacagcgtcttgtttggcatactccgtcctccgtacaataggattccatcggctctcttaccccgtattctgtcggcatattctgtacctgtcacttcgtatccagggacgcctgacgggtaaaatgggcattggatcggaggctacgattttattctccgagacgatccttttagtttctgatatgatactagctgtctgtaccgtcccataccatctgtaacctgtgttttacaaacgaggttaacggccaccgctatggaccgtttggtataggatcttcgtccaggcaaaatagatcgaatgttgatctgtggactcgagtctatgttatgttggactttctacattgtacatgtacatcttcgtctcatgcccctcaggctccctgagaatggatttcgctgaacggcctgcatctgggtttttccttttgaaatggaatgtttttagagaggacaggcctaggatgaatagctaccttctaaccatactatcccatgccatcttgtatacatgggatttatcgggtggccaaaatggtggaccctggcgccattccgtttaatatccctgtatttccactgttacctcgcttggctattaaaacctatttgcctcacaggatatctccggtcgatcctagtctagcggcattgtgtgtccaggtaccacatttcattctggtggatgcttctctctcaacatcttatacagcccagtaactgcccagctgcgtaacgatcatcagaatcaatcggaaccgatctcagatccaaagaaaaaggaaaaagaataaaaaaaaaaaaagaataaaggttggcgacagttgtcccgcttgacatcttaccctcgtttgggccttctttttccctcttttctcctcttcacttgacacgcatactttttggcgcctttaatcgcctttcttattttctctaaatcagaaacaaagcagtcttaccctttactctaattgccagaagaaaccctgaccctttttttttacggcacttccatcagacccaccaacgtctcatatcggggggggggggtgtctacggtatcctttttgggctagaatttctcctattgcttctgttgacgaaagtcttgactctacttctttttccttttcaaaagagaattcgtctttggttttgaattatcgtgggtaagggcaacacacacacacacacacatacacgcacccgcacccaaactagacccttaccatgtcagtcggtggcccttgtctttggttgccttctttatcttcgccagttcattcgcccctttctgcggtttcatctcatctatcagcccgcaatagcgagagactctctttagggcctaggactatctcaccacggctatctgcgcagaagaaagaggagcctgccgttcctgttcctgtgcacgttcccgctcgtcctgtggagatgcagccgactggttataaggctgaaaacgccttgaataacccggcggcacagcccgtcagcatgggctcagcgccgtacttggagagagatgtttcacaggatacggtcaaccaccgcttggaggcggcgaaacaggatatgcttccgcgtgttaaattggagatcccaagtttgaatcagcggggctttttggctgttcagcccctggtcgggcacggcggtcatcccgaggaaatgggtatttcatcgttttcgggctcgcatgaccagagagacgaccacgacagagaatcgacaatcagtcctgatgacgataaggatatgatgggtagcgatgacaatagatcgccttcgatggagaagaagaagatgaagcgttttcggtatggaatttcttatcttccaagtaccacgcatggttgctgacagaactatagattaacacataaccaaacccgatttctgatgagtgagttcactcgccaggcacatcccgatgcagcccatcgagaacgtctgtcgagggaaatccctgggttgaccccgcgtcaagtgcaagtctggttccaaaataggtagggtgatcaactagttgaatcgtctgtccttgactaacgtaggtgtactgtcaggcgagcaaagctcaagcgtctcactacgaatgatcgggagagaatgctcaaatctcgagcccttcctgacgatttcgataccacaaaagttctccgcacgccctttgagggcaaacaatcaggtatcacgccagtggcatctccacaaggctatggcgttccgaatccggatttcggggctttgagaacactgcgtaccgattgctacgctcgaccaaatgaagacgactatctcgtctcacctctcagctctgcatcgacagcaggaacctacatgtcctcgactggacgaaacgacagcatgtctcagtcgaacatgatgttccgtcctgctgcgtcttcctccatgtccgatttacatagaaccatccgcaacgattacccggtcaccaggtcaagtagcttgtccgatgcatcggcccatccatcgccgtatgcggggtatcctatgcacaatcgtttcgcggggccacagccaaatcagccagctctaccctatatgagacgacccatagaatatgccatgcctcgtcatccaggcatgggaccttatgatcaacatcaaccgtttgagggctcggtgtcaccgacagacactcaaggctcacatcttacttatgacataaacaatctaggttagtatctttttccttgcctcgacattctccaacccgatttcctaacatggttttatacaggcccgcaacaacagggctacaatcttggaatgggctctcaattaccaccccaaggccgacctatagccaccatgcagaacctgccagtctcggcagcacaaaattatcggccctattcctacgacgccaccgcaggcccaatgggtacaccaattccttacacacaagcaaatacctcgactctgagtctcccaacttccgagccatcatacaactaccccaactatatccagcagtgagaggggagtaagacatccttgaaaaaagtcggctgttacttgtctgctatacgacatgctcgttttgctttccgcattttctccttcgtctccatctcatcacctccaccttttggttaactggttagctgggttaaccaaggatccgcgatctatatcagcgagtattaatcattaatcgttctcatagcgttcaccgtttctggtttctgggtttcttctttgtcctgtgttatcaaccatatttttaaaatctgtttcttgcatgcatctacgtttcgtttgttttcatatcatctttccgttttgtcgcgtttctttgggtctggtctggtctggaatctagcgttcattgtctgggggacagtttgtctaatattaattgtttctgatctcgctgcatagcctcggggtggaaggtcaaaatggtatagagatgccactgtgtttagaagcagacagaccactgagtctacaattcacttgaaccaataaaccaagttgtcctcgacaattctctactttcatctactttcatgccgccgtaaacaatccaatactcgacaaattatgtaaggtcgtagctccaattaagcagttccaacctccccacactaaccttacaagtacaacccagcaacataggtcatccaaatcctgcctgtcgaatcagagtcaagacaaaagtaatcaaattcttcttgtctcagctcatccaccatcaggccacatcgtcccgccactcaagcgacgtctatttgctgttttccgcaatgggccaatcagcgtccacgaaagataacactgtaccacgtgacacccactctcacagccaatcaaggttcagctattgataatcaccactcatcctctgacgcatgcagaacagtataaaggaactcgtaaaagcagagtgttattttctttctctcacacactctcatcttgactcaaagcaatatcatttcgaaggaatccatccatcaatcttgcaaactcacaaactcacaagttcctcaacttcatcttacctctcgatcttcagaaaccgacgtcatatcaaatcaacccgccaaaatggtccaccccactaccacctgctgcaagaccacacaggacggctcctgcgtctgcgccgctcaggctaagtgctcatgtggccagcagagcgccctccactgcagctgcaacaaggcttcctctgagaacactatctctggtccccgctgctcatgccgtatgtgatttccctactctagtgatttagaataaactttatactaacattgaaataggcactcgcccagctggccaatgcacctgtgagcgagcggtcactgagaaccaggctgtttctggtgagacctgtgcctgtggcagccgtcctcagggtgagttttctcctactacgaatgcgattcgtgttattcaatgaatatcctgctaacttcggctttagcttcttgtacctgtgagaaggctgctgctattgattccgcccttgaggttgacttcactggcagtgcttaagtgacttgattcacttgtactttttgctttgatggggctccctatcattgaaaattgcatttttgtccccgtcttgatggggtggcgtcttgggcttgggcatttttactgggtgaggttgcttagggttatcaataactgctggatgagatacgagatgcaaatttaatactattcacggcctactacaatatacagagaataagttatcacgagtaacaacaggttatattcaatgcgccaaagctgtaaaatgggcttgggtggcttcgaaacgggaatatacatacttcttaaaatagacctacgtacttgatttcctctgccacttcttggctatccctttccgttttagtgctcaggctttgccgcttttgctcactgagtagaactgagcatcacctgatcattacataagccatatgactcgctcactgagcgtcacctaagcgctctgatttgctcactgagcaccacctgattattacataagctcaagacttgctccttgctcaccggagcaaagcacagggagcagctaagtcagcagctcacctcaataaaatgcaccacgctagccccatccaaacgcagtcgttcacccggcactcttgaccgttgtcccctcaacgaaaggctggtgtcatcaatttggcggtcgatcctggttgttacgcctccacctggaaggcaaatgcacagtggggccacattattggctttactattctgcgcctatgccactattcaacctcgccgagctctacatagttgcggaatatatccaaccctccatttttggttctacaatatctttacgcctctacctagaaggcaaatgcacagtggggccacattattagctttactattctgcgcctataccactattcaacctcgccgagctctatatagttgcggaaaatacccaaccctccatttttggttctacaatatctaggaatatcttagaaaaccctagttagaggtttataaatctagtttagtgttttattctgattttttttagttgattttttaacggactatcgctcttgctcccgactgcttactcctaggaatacgacttcagctctagtgatagatatccgcaaaaatattctagacctattgattatacctactgtatgatctagccgcctataacgaaatttgcggcccctcatttatctaaaatattctaactagcaatcagaaaatacctcattctaactaaagtctgataggacttcctaggagctctcagacatttcgtgccaccacgatatgattggtgagataatatagatcctaggagcttaagtactggtacccactcgcgagagccgtgagtgctaacgctgagagtcaaagtatataaaagaaatactgatcccttctagagtgaacatatccaagtttcaagcatttctactcaaggtcttatgaagtctgctcataagttcagcagccttcagtatcctgggtctgtctcttgtcagccccttagtaagagcaaaagcctaactattatacagattgcctgatgccacaaagaaaaccgataacctggtcgatattcaagatctcctattcgatgagagttgcaggaccgtttcctgcataatcctgagctctgagtttgttatatatggccgaggcctaaatggaaagatgtaagtgactctcgcaattttaccagtgggagcgcgagaatttgcagggggcctgtggctaatgtgactatatattatccgtcatgccacgataatcgagagcctcgcgtaccagttttcagtctgtgtcattctactctgacttataggcatcattttgccccctggccctagcttgtccgaccatgcttcttcctgtcgtaggacttaaaagccttcaatcgagtcatggtaattgagaaaatcagaagagcttatctattgaagcgaagacgtggcatcccggtttgttgacctatttagacttgacgagacaaccaaaaggccgttttctattcgctgcccctcagtgttccggcttcatattgcagacctggataaaagtctctagaactgacaagacacccgctagttatcttgttatatttcctatgtttgccaggtcgatgctgttagattacactgttttgatttgaggttcgtgcaaattaggacccaagttgcatcgtcgaaattaattatgcactaacttagaaggagagagagagatgaatgatctatgaaatagtagggtatttataccctgtagatgtagcaaaaaaacaagaatactagtcggccggcagtattttcagtaatttttccagttggtcttctcaaagtgtttttttacctactaagcctaatcaggaattttctgcaactttatatctatattcaaaggataacattgaaccttgcatcctattcttcttctccattcattccaagtttcagtctcactactttgttcttcttaattcattctaagtttcagtctcacttctttgaatctcattatattcgatttatcttcttcaaacttacccaccatgtccctccaagccattcccgaacatcatccagatctcccatccggtcctggtgttttcacactagaacagatacgatgccttgaagaggctgcaatcctccttcccgagcctcagccgaatacatccacaaacgccagtggtaaaagaaaaatttccgctgcattcagtgcaccaagatctatgtcaagctcatccaccacctcgtcgtcgtcttctgcgtctgttgccacccatggtttccagcccaatgtcatccgaaccttcgacatcccaatggcagaagaaagtgtcgaggtgcttgagtatattgggttcgtaccggatgttgccagactgatctatgaccgatattgcggccgcccaagtccaagccaaaatcctgatgacctaatggcatatgtcactgcacatctcgcctctcttagccgacgacaatacgataacatgagccatcaggaggcgctcgctgatgttggtcttacgcaccaaattcaaggagcaatcacggacccgagattctcacacatcttcggtacccagaccctcacttactgggcacaagataccgttgaaaccaactatgccgctcttcttcgtcaacagcaactgctacaaagtcatgcaaacaagcgcatagctcataaaaagaaacataagcggcccaggcatgagccgagccgagaagaccaagacccatctgagcagcaacccgtgaccgcaacgatcaacatgacaccccaagatttccagttcccagacacatatgtgatggttcagcctgatgccaatatcctcgccgatcacatttctttatacaagggcaaggcatatgatgaattagggccagcgggtgatatcattgagagtgatggaacagtcaacctaagaccactcagcacataccccggcggagacttcaatttcgattttaatgcgcaatactggacccccgaaattgaaacggctgaagagtaccgcaaatttgcagaaaggagaagccctgcagccgatacctgcattattcacattcaggttcagcgaccattcatcaacagcctccgaatggagaatctatggtattctcccaactggaaagagtacatctggacttgcaggagacaggctacccctcacccgaaattcgaccacctctggcgacctgggcaagctaatattgtcaggggccccatctgttctaccctcagcacacagctagtccgcatccgcagagaaaacatccaaagtcatatcactgaggacaacgtgatgcgattgctgtctgggagaaaggccactcggtgggtattcgttcaacgcgatgtgattgatcggttagcagaacacattcgagggaagatgcatttcatcattttcgaagccgcagttcgtttctcatgacatcggtctagggcccactttccgctttgattgcagccctttttcgggtcgttctttatttatctgttgacatgtttctttctcgaaaaatatcaccctctatggtaaaaatttactcagtgagcctgactctgagcgccctcgtaaaagcggcggcagctaagataggaaagccccgcccggtagaggaaaaatggtacgtataactacttaggtacaacgtgtcgagcctcaaagcttgtttgcaatgggaagatgcagatttttaaaacaactataatccggcctcttgcccagtgtttttgctttggattttccacatggaatcagtctgtccagacaaataaataactacaatctactccgtacacacacttacacctgccatttgcaccgccacatcggatcagtattcctccgtcgccacataccgccacagcggaaccgggctgatcgacagcggaagtgacccaaatgaaatacagagcggacaagttacggggatggactcatctcgacttcgcgtgctgcccggctcatttatcataggatctctaatttgagcgctattttgtatgttgtcgcggttcaatcggatagctccggtcccccaccaaccaaccagtgctgacaagctccccagaattcaaatccctcaacacaacacccaaccccctgttttccaagaagctcccacgagcccggaaatccaccatccgacacgttgcatggccaatgccccataatcgacacgccagcataaccgggacatggttgtgtgacgctgtgcgtccgatcgcgaaccccctgaggtgataatcccgcgtggcatgcgagggcgcacctcgaccgaaaacccccgccatactgtagtcgtcttttctttcgcatccgtgggctgataactgcactacgctatcatcgccgctatgtcgtcaatgcgagggcttgtgcagttcattgctgatctgcggaatgcccgcgctagagaactcgaggagaagcgcgtgaacaaggagctggccaatatccggcagaagtttaagtctggcaatcttaatggttatcagaaaaagaaatacgtttgcaaattgctctatgtctacattcagggttacgatgtggactttggccatctcgaggctgttaacttgattacctcgcctaagtactctgagaagcagatcggatacttggctgtcacgttattcttgcatgaggagcatgagctgcttcatttggttgtcaacagtattcggaaggatctgctcgatcataatgaattgaataactgtttggccctgcatgctgtggccaatgtcggtggtaaagagctgggagaagcgctcggctcggaggttcacaggctgctcatctcaccgtgggtttagaacggtttttgttctgtttatgattattctaacaccttttagtacctccaaatctttcgtcaaaaagaaggctgctttaacgctgcttcggttgtatcgaaaataccccggcatcgtgcgaaacgaatgggccgaacgaatcatatcgatcatggatgaccctgatatgggagtaacgctctctgtcacctctttggtcatggcactagctcaagacctgccagaggaatacaagggctgctatgtcaaggctgcacagcggttgaagcggattgtggttgacaatgatattgctccggactacctctactaccgcgtaccatgtccatggatccaggttaagttcctgcgcctgctgcaatattatcccccatcaggtatgtttagtgctctggcaaatcgttactcggtttctcacatacaattacagaggatagccatgttcgcgagattattcgagagtccctctcccagatgatgcaagctgcaatggaaacacccaagaatgtccagcagaacaatgcgcaaaacgccatccttttcgaagccatcaacctccttatccacctcgactctgagcacaatctcatgatgcaaatctccacccgtctaggcaaatacattcagtctcgggagactaacgttcgataccttggtctggatgcgctgacccatttcgccgctcgggctgagacccttgacccgattaaaaagcaccagaacattatcctaggctcgctccgagaccgcgacatcagtgttcgtcgcaaaggattggacctgttgtacagcatgtgcgataccagtaatgccggccccattgttaacgagcttcttcgatatttgcagactgccgattatgccattcgagaggaaatggtacttaaggtcgccattcttactgagaaatacgccgccgatgcacaatggtacatcgatatgacattgaaactgctctcactggcaggtgaacatgtcaacgacgaagtatggcaacgagtgattcagatcgtgaccaacaacgaagaactacaagcttatgcagcacacactctgctaggctacctgaagtctgattgccacgaaagcttggtgaaaatcggctgctatgtcttgggcgagtacggccacctaatcgccgaaaacgcaggctcaagccctattgagcaattcctggctctgcaggccaaaatgttctccagttccgacaacgcgcgggcgatgatcctctcgtcatttgtcaagtttgtgaatttgttccccgaaatcaaaccccagctcttgcaaatattccgcctatacagccattcccctgattccgaactgcagcaacgagcatttgagtacctgtcgctggcgactctcccgaccgacgatctgctgcggacggtctgcgatgagatgccgccattctcagagcgaacctctattctactttctcggttacaccagaaaacagcaggcgcgagtgagaagaagacctgggttatcggtggcaaggacgcgaatgcggacaagcaggaaatgctcttggcacagaacaccggtctcaagcgcaccttcacgacaatcgtcaatggtacgcgcactgggtccggcaatacaccagccagcccggcaagcgcgtcgaatgcggccagttcatcgggcgacttggcaggcctcgatctcagcggtcccacagccccagctcccaacatggccagtgctgctcatctgaccccagaatgggacatcggctacaaccgactgtatttctcgcgcgagggtgtgcttttcgaagatgcacagatccaggtcggactgcgctcggagtaccgcggtcctatgggtgtcgtgaagctttatatctcgaacaagtccacgtaccccatcgggtctcttaccaccaccgtcgacaacccggcctctcctcagttgaagatcgacacgaggaacctgcccgaaccaacagtcgcggctgccgggcagacacagcagactctgttctgcaccgctcatggtcccttcgcggatgcgcctaccatccgtatctcatacttggccggtgctctccaggcttacacactccagctgcctgtcctgatgcatcgatacatggaatcctcgtctttgtcagccgaggagttcttcaagcgatggcgccagattggcggtggacctctggaatcccagaagacctttgccttgctgggtaagaacaagactaccaacgagaggttcactcggaggattgtcgagggattcgcattcaagattttggatggcgtcgatccgaactctcagaacattgttgggtgcgccgtgtaccaattcgaggggggtaagacgggctgtctgctgcggctggagcccaactacgagaagaaggtatgtatcagaagtcttccaattcgtttcgtattgtcatgctaactctttcgttcagatgtatcgcgtcactgttcgtgccacccaagaagaggtccccgggccactggtcaaacagatggagctgaagctggcgcagggcatgagagcagacgaagccttcgattaaagcgtctgcaggtgatatggaagcattcatgtatatctctaattgaattatcgagtaaaatattagcaaatgttcctggcggaacatcgcatcttttgtataatccttgtcagtttagtaacaaatagaggtgcgatatgctatacatgcatctaatgatcagcattctcagcggtgacaccagaagcccaaacacttttaatcttgacgaaatcgtaactcataaccacccccagtcctaagtcaaacaacattcgcctccgccttaggcggccgatccccaaagatcgtagttccaaccctaacctgatcactaccaagagcaattgccccctcaaaatccgagctcatacccatactaagctccaattcagcctcatccccaaccaacccaagctccttaacaacccgatccctcgtctccctcaaacaaacaaaatcctcattctcattctccaccgtcgtcgcccgggaccgcgcaatagccccaatagtcatgaaaccctgcaacttcaaccggggacactgctcacgaacatatcgacacagcgccggcgccgcagcaggctcaacacccgccttattctcctcgcccgacgtattaacctgaacatagatacgtagcctcccatcctcgtcgtggttcgtagccgccacctcagcccccctctccccccaccccttatccagcaacttcgccttcttttccgagtccacgctctcgacagcccacagtccgcgcacgtcccgtgccagcgtcacgcacttgttgctctgcaacccgccaatgaagtgccatttgatgcttgcgggcagcagccgcgatttctcgagtagttcttgaaggtagttctcgccgaagtgcacttgcgatcctggcgcttggtgcagtgccaatgcgtcggatgcgggcttgagcttagagacggcgacgaggcggattggtttactggggattggggattggagggccgctgtgctcactcgggcgcgcaccgatgttaggtttgagaggagtgtgctggcgcgtgctggtgttgctgggttcattgttggtggttgcgatggtgtgttggttgtcattgcaggttggtggggttgttgttgatgttgttgatgttgtgttgattctgttgattctgattgttgttgacgtatagatttgttgttagggttttgaagaatttcatataagttcagatagggacttcaatgatgtgttcagtcaattgagttgagatgaatcaaatccaagctagtcaggaatagaaagttagactttcgataagggccttaggcagcaatttcctcggagaatattccgtcgcacgtgactcacctgcgccacatctggccttgcgcctcaccgtctatttcgcttttccgtttgcatctttgaatcgagagatccgtgagatcatctacatcctaagaatgtcaactgacatatggagtcctccgtacaaactctatttctgcagtcatccggtaggcaatcccgatgcgagatcctggcggcaagccagacagacctctgctccaatcacagatatgcatcgtcggaaaagagactgcggagcgccgggtatgggcggatcccctcagttcgtctcaacctgtcaggactgactggctctcggctggtcttgtcgatcagattgtcgccgttgggtttcaaactagtccctcgatgcaggatcttgatctctatttttaattccgtccaacctgttgaatcagaaaatagccgcctgcttgtctttttctagtctttcttctgagactcccatttgcattacccccagtccccaccagagcgccaagtttgctgcctagactacctgtccaagagccaaaatagcggtaccgagttcgatggcgccctcggcgagaatacgacctggtgtcagatgcaacctgccgccgacggatggggtaaggtctaggcaaggtataagcccactaagaatataactataataatacccatcataataagcaaaaaagtttatggtctctttgacgtcagctccaatcaatagccgtggttccattcatagacgcggtcaatgactattcactcatcattacatgaggcctagaagaacttaaagagctaataggctgctcttctttgcctattctttttgcttgctgatcaacgtcgtcaactctccatatcatcactcatttcagctggtctgaataagccttcaaatatctgagcatctcgacatcaccagctacaaagcatactttccgaggttttccgattaggcttactagctagtcagcgacgctcgaaaccattcacacgccatttacacactgggcatttgacatcctcatatccttgccatacaccatcatcaatcttcatatcgcagtcaatctgctttacatattcaactaccaccaagtccatatcgtccatcgtccatcaactgtcaactgcaactgcaaatatccagaacttactgtgggaatcggcaggacgccccgcaacggtcaacagtcaacagtcaactgcaacaaagaagcatccaacaagagcattatgtgtcgccaatacttcacactctacgaatggtgccaatgcgaagaagacgccggcaacagcgtctgtgccgcccatcgtcggaataattgcccgggcatcagcgtcgagaccgtgcacatgcattgcttctgcaactcgcatgccacgcgtggtttcaaatctgagaaggagacccgcaagaaggagaataagaccagccgccgatctcaagattcccttggtgaaaaggattctttcgggcgccgttggtatcagtggtatcaatggcgaggtctgcggtcgcgttagtggcaacatctacatttgacttgtttttctctctcttctctgtctattatttttttaaagctttggtgttggggggttgggatctcgatttagatgagtttacggtcttccattacctggatacgatggtctagatgatctacatgagatccgatttttgcttttcttgaatttgggatattttcgactattctatattagagatgagttctaataaagagcatgaattatgaatgtgcattgttgcaaaagctaataaagacggatctagttattatacaataagaaccaagtagaggcgatcaaagaagatcaataatcaattcctcagttcctcaaatcttcaatagaaatctaagattgttgtctattgtatgtcgttgtatgtcgttgttctatggtctgctgatcgaccgaacccctaccccatgtggcttaacccaaacatgtgaatccccacccttcctttgtttctttgttgcttttgattccctttccctattcatcgaacctcgacctatcatctcttttcattccttgaatgacgagaaacatcgtatattgaccctttgtggcagagtcgaaatctgcaagatggaatacaagcccccctccactgcgggggacccgccattaccaggggacaatggtattgagaacaacaataacgatgaggcgcattgtgaactgatcgattctctgaatcgcctgaccctggcgacagagacaccattgcctttatcacctcgtctttctcctgttccatcccatcctctcccctctagatttgttcaagccgctcgagctgtacctgctattcctctgcagcccagtgaacctgttcaagctgtctcgttacaatcgaatcaacctgtgcaatctgtcccacaaacagctggctctgtttctgttcgagacgaacgacacaggtcaattgcatcgctacagaagcaaaggtctgttgcatctcttcgttcggtctcacaaccgctcaaaccttcatctccaactcctggcccttcacgccgcacatcattcacctctgtggggtcgccagccaccgcagcctcagccgcgatgtcccccacacgccttgtcatcagcccggctccagaagctctagttccgactgctttgtctgtcgctgctgcgcatttctcaaaggagcttgaattacaccggtctggtgatgtcaatactaaaactgctgttattattcatgacgactgctatggccatcgctactcccagcttgaggcgccaaaacgaactatcgacagcattgtcgaaagaccagagcgcattcgcgcctgcgctgtgggcatatctgcagcctatgtccgcctcggctctcgatatgcggaagatctcgctgcaaatccaagttcggacttggacgagattgatgtccctttccaaattatcaagactgatcgcaaggtgcatctgtctgatactgccgttacagatgttcatggaactcaatggatgtcagaattgaaatggatgggggaccttgcagaatcacgtctcatcatggatggaaacgaacttgccagacaacggacggaggcagacgacggcctcgggacaagtggtcctgccctgaatgccaacgacctttacttatgctcagagtctgtgaatgccttccaaggagccctagggggcgtctgcgagggagtggatctcgttttcaagtctggtccgatccagcgcgcattcgtctgcattcgacctcccggtcaccattgttcagctaacttcccttccggcttttgctggatcaacaacgttcatgtcggaatttcccacgcagcaacaactcacggtctgacccacgctgcgatccttgacttcgaccttcaccatggcgatgggtctcaggatattgcatatgaccacaactccaaattactcagcaaaacacaaaaagctgacttggccaaaaccgatgccacgaaattcaaagagtatgaagacgctcctccgtacagcaaaacagctatcggctactatagcttgcatgacgtgaactctttcccttgcgagaatggtgagcgtgacaaagtcatgggtgccagcctctgtgtcgaagcacacaatcagtccatctggaatgttcatctcgaagagtgggccgatctcgatgagttctggaaattgtaccgcacaaaatacaatgcattgctcaccaaagcccgctcattcctacggcaacgtacaatggaactcagtcaagagcggcaagtgaatccgaattccccgctgcccaaggcagctatcttcatctctgccgggtttgatgccagcgagtgggaaggcaacggcatgcaacgccacagcgtgaaggtgccgactgaattctatgccaggttcacggcggatgtaatccgcatgtcgcaagaggaaggcctcggtgtggaggggcgcgtcgtcagcgtcctcgagggcggctacagtgaccgcgcgctgtcctccggtgtgctcagccacctgtcaggtttgagtgagaactcagagttcagaagtgagtggtggtctcagagtaatctgagagaattggatgccatcatggctccaacgcccagcaaagggcgcaagaagagtgctgccacctacctgacagccacgaaatcctttgcggcaaaggtcgttgtccctgggagagaccggaggtccaccggggacctcgatgccaacatccctgccgcccctttgccagaagtgagctgggcggtggccaccggggagctctcgaagctcatcatccccgatggccgccagacccggagctgccgcccggcagagctgaaccgccagcgccgagagcagagcgctcaggacaggggtctcgacctcatcatccccgtcgagaaggggcgccagttgcgcgcgcgcaagcccaaggagtcgggccccgtgcccaccaccccacggcgccaggcccgcaagggtctgaagacccccaaaaccgcggccgccgccacgaccctccctgctgcctcccgcgaggcctccccgtctgttggtgcctcccgtcggaagagcaccagtctgacgcgtgcgggaactccgcaccggggtgtcagccccctggatctccccccggttccacaggttccaacttccgtggggggagtcagggggcgcccccgcataattctcaacatgccggcgcaggagcccgctcgtggccgcaagttgtccggcggtgcggttgaccaccaccgccggggtcgaagctcaaagtcccccaagaaggggaagaagaagcgtgggagcaactccggcgagagttcggctgcttccgccggcagttctcccccagtcgcggccaaggatgccgtgatggagggtgcttaggggggatgatctttgtcttgtcttcttttttcaaatttgatacccagactgacttttgtcgaaacttccgtcatttgtgtaaactttgtagaccgtaacagtagatgacggtttcaaattctcgtctccttatgttcttcgacacggcgtacacaaaggaactggcttcgatccgcgtgaaggaagatcccttggatagcccaaatgctgagcgcgatcaacctgcatccaaccgccactagggtaagaaaagaattcgttgaggtacatacataagctactcgtgaagtaggaggcttttcaatatttgtatgctccttcatcgtacaatggtgtatacagcttatcccttgagtaactgataaaatgcacatctttcatcaaatgggcctgtggtttaggggtataatacccgcttcgcactacaacagtgacttgcggggggtcccgggttcaattcccggcgggtccattcttttttgtttttcttttttttttgtctaccttgcttcgtatattattcttttatccttcttggttatgttcggcttgttttcatgacatatatggttagtactgatcctgttatttgaattgtaacagtatacttgtatgttcttggttgatgttgggtgtcgtagtttgtatgcaaaatgtacatctatatatatttacctatgtatgccctaaaacaccacccgcagcctctggtttaactcgaagaatttcgaaaccaccctcgtctctgtcctcacctttctgtggccacaggatttgtcgtgtcaaaatagctcgaaccatcatatagcacacaaaaaagtacatcaacagcaacggtagtatcgccgcacacccaacaatttcaataggcttgcaggagaatgccttgccaatagcaaaagtggcagtgatcaaggcagtattagggaaaataaatgagaaccaggtcattgagaagaccatgcgtccatgtccaatcgccgaccaatgggccgtgcttgcaataatgaagaaaaagatggctaacctggagaagagttagccgagtacacagaaataaccaaacaatcaaacatacccccaaagccaaaggcacgcaaaattagtaacaatctttagcacatcggcggccagcgccccgtcacccataaaatcggccggaaacgacctcttcgccccagccgccatatttaccagcccggcagccgtaaacccgctcggtcccacagaaacaaacataccaggacggagattttcctttggtagcttctgcgtcatcagccggtatatgaaggccgagtacaccatcaatgaaatcaaaaagccaactccctggatagtcgtaccgccaataataaccggcaatgactgcgacggttctagctttgcactgaggatcccagcatgtgggccaatgatgagcatcgggtacgcagggaaaatccagataggagtcatctgcgcgatggtgaatgtctgcgtcgaccaaaggaggagatagatgcccgccgagaacataacggctagagtggcatcgatccagaagagaatacagactgcgtgaatcagccacggacctgtgttttcgggcccgtactgagatacgttgattaggatcgtgccaaaggatactatagctgcgggtacgaagagtgactccgttgggtgcatgaatgacgccttgaatgtatacggataatgatagaaccggaccagcagaagaccccagatgatgagatataaagcgatattgatcaggaaaaccacgatgccaatggtatccaagcccctgaaccgaaatggaactggttcttattagccatactcaaccgaacaggatgatatcgaccatgcacaccttgatacaagacattagctaggccaccagtagccatagtcaacgtaaaatacgcccacgtaatatgacgaatgcgctccttccagctcagctttccagaaaccgtgtgcttgagcccaaacaggctcagtccgttatactctcggcacgcaccggcttccttatccggatttgttttcacggtagcccgcgacgaggctcgctgtaatgcagcctccagagcagacgaatgagcctcgcaaaccctgccaccgggaatttcctcggcagtccccgggattgagagcgcccgctcagcatcttctatcgttggtgttcggtacccgtcttcgccgggacttcgcatgtgccggggtagatcgggttcggtggccatcactgttaactgcgggccgacccagcgagtgcacacggccgaatacaagcgtggatggtttgaacttccccctcgttcgggggttctattgtgctgcttgcggatgatggcatgggtagtagaggtgatgtcgcaaaaggctaagataccagcatggggaaaaaattatgtacgatctcaggtttctgttgtcgaagcccctttaattaatagcgattgaaaatctaagtagaaaagaatactagacgggtcgttgggatcgacgtgaattaatgtggagaccgatggcaagaatccacgactgctttcgatcggcaccatgaggttgctctgagagaggaacagaatagaccacaagctatgtggattctcgggaatatactcgagatggtgaattcaggttgttgcaggtagacaagtctacttcgcgattcgttaacgtgcaatctacgttattccattttttttttttttttttttttttttctcatttctcnnnnnnnnnnnnnnnnnnnnnnnnnnnnnnnnnnnnnnnnnnnnnnnnnnnnnnnnnnnnnnnnnnnnnnnnnnnnnnnnnnnnnnnnnnnnnnnnnnnnnnnnnnnnnnnnnnnnnnnnnnnnnnnnnnnnnnnnnnnnnnnnnnnnnnnnnnnnnnnnnnnnnnnnnnnnnnnnnnnnnnnnnnnnnnnnnnnnnnnnnncgttaacgggcaatctacgttattccttttttttttttttttttttctttctcatatctccaagctatttagtacggagtactataaagacaaaacaggcaatagggcttagggctcggtgctatccccctgaaccgtggaaccgtggagagccgaggcatttgcttgatctccactcgcctacctgatatgtatactagtacatgccgtagccagctgttttactacataccacgttgtataagtgactttcaaatatagtccttgggcttagtctgtcatacttcaactcaaacacgtcaggaatgacagacactcgcagatcggtgctcatcacggggtaagttgcagactttagacagataccaacaacaacttctgatatatgcagtagatgttctccaggtggcatcggcaacgctcttgcgcgcgagtttaatcgaaatggactacgcgtgctagccactgctcgcgaggcggcgactatttctgatctggcagacatcggcattgaaaccttgagtcttacagttgatgacccggagaacgtgaaatcttgtttcacagaggttgagaagagactcggagacaagggtcttgattatctcgttaacaacgcgtgagtacatgtggattttgtcattttatccgtgaacgatgaggtacatctggctaatctcccacagtggtcggagtatgtaaccccactctgcgactgctagagtcaaccatttataggtactgattgctgcagattataccgttcccgcgatggaagtagagcttgccgaggttcgccaaacgttcgagaccaaccttttcgcggtcattgctatgtgccaggctttcctgcccttgctcatcaaggcgaaaggtactattgtacagattggatccattgccggggtacgcttgaggtatatccatatccggagatctgatcgtactgacattgactagatcatcccatatgtattcggctctgtctacaactcctctaaagcagcactacactcgttcagtgacacgcttcgcgtggagctggagccattcgggttagataccacaagccccaagatctatgtcgtgttttctaaccaggatcaacagtgtccacgtcacaacgatcgtaaccggcggtgttcaatcgcgtattgcgcggaccgaccgatctctacggccgaattccttatattcccccatcgagaccgagtatattgcccgtgtgaagcatagccagcacaatgctatgccgaatgacgcctatgctcgcagtgttgtttctcaagtgttgtatggctcagctccatggcgctggttgtggccatgggctcgtggtcgtaaggcctggatctgggaggggcatgctagctggttgatttggatgttgtcgggtggctgggcttggtcgggactgtttggtcgggccatgactaaaatgttcaaactatggaagatcaaaaatgcctcggctaaatgaaggggggaggagagaggtgtagatgtagtcaataagatatagtagacaaacgcaaaagatataacgcatatagatcatacaagtaaataaacacccgtttacatccaagtaccgactttattagccatgttccgttatattcgcgtaccccatgctgagtcaggccaggaacgatcgctggttggccacggcacccgattctagcgtaacacaaggttacctaccccgagtgaaaaagaaagctgttctcccggtcctttaccatctaaacgggctttatatctccgcccttccacattttccctctcataattcatcatgtttaagcttgctcgcggtagacccgttgcggcggctttcaaggctgcaacagtgagttatatctgagatcgggcgctcgtttgatgtgttaattaagctgactttgttgaacaatagcaaccctccattcagagcagaatcgctttgcagaagcgaaacctttccatccacgagtaccgttccgcaagtctcctcaagactgtacgtccacctgcgtttcaccctttggtcgcctaagaaggaacccaggatcactgatcaacaatctagtacggtgtcggtgtccccaggggtgaggtcgccaacactcccgaagaggccgaggctattgccaagtctatcggtaagaataatataccactttcccccgttgaacgcgctcgctgaaaattacaatccaggtggtggtgatcttgttatcaaagcccaggttctcgccggtggccgtggtaagggccaattcgacaatggtctcaagggtggtgtccgtgtgatctactcgtgagtcgaacaaatctaaggacgggttgtcaacaatgaagctgataaatatctttacagtcccaccgaggccaagatgtttgctggtcaaatgatcggtcacaagctcgttaccaagcagactggcgctggcggccgtatctgtaactcggtctacatttgcgagcgcaagttcgcccgccgtgaattctacgttgctgtcctccttgaccgtactactcgtggccccgtcatcgtctcatcctcccagggtggtatggatatcgaagctgtcgccaaggagagccccgatgccatcacaagcacccccattgatatccacgtcggtgtgactgacgagatcgctcgcaccatcgccaccgatcttggtttctccgagcagtgcatcgaggatgcaaagaacactatccagaacctctacaagtgcttcatggaacgcgatgttacccagctcgagatcaaccctctgtctgagacttccgatcaccaggttttggccatggatgccaagcttggattcgacgacaatgccgagttccgtcagaaggaggttttctcgtggcgcgatgtttcccaggaggatgccgatgaggtcaaggccgctgagtacgttgccttacccagttatagcaaaaacaaaacggcgcgaaacaacattgactgactttcatctttttccaggcacggtcttaacttcatcaagctcgatggtgatatcggctgccttggtaagaatcctgttgatacgtcaaaatatcacaacgctaattctcgcttctagtcaacggtgccggtctcgctatggccaccatggatatcatcaagcttaacggcggtacccctgctaacttcctcgatgttggcggtggtgccacccccgctgccattaagagcgccttcgagctgatcaccagtgaccctaaagtgtctgccgtcttcgttaacatcttcggtggtatcgttcgctgcgacgccatcgcccaggggttgatcaacgtcgtgcaggagatgaacattaccacccccatcatcgcccgtttgcaaggtaccaacatggagaaggcccacgagctggtatgatgacagtccccattctcccttttttcgctatggagtcaactaaccacagcccctgctttctagatcaacgagtccggccttaagatcttctccatcgaggacctccagaacgccgctgagaaatccgtccagttctccaaggtcgtcaagatggcccgtgagatcgacgtcggtgttgagttcaccctcggcatctaaagggcgtttaaccttttgtttataatgatagagagggtagggagcattttcatttgcctttttcctgggcctagcgaaccgagccgaaccaccgcagtgacatcttagagtgatctttgtaatgcttttgcgcctgttcctgtgtcatttattttcttgttgtcactgtattcttgagtgtttctatgacttagatcagttcctaatcgggatatgtgagagatgatatattgagctctcattgtttagtgtaaagtatccctttctataaagttcatctatgtagggtagatggctgcttgtccgagtgaggatgacctggactcggccatatattcttcgagcttctttgaaggcttgacagaagctacgtggggaatgataacattctataatgtctccatgatggggcttaaaaaaagaaaaaggctgcgagagcctcccgtactgaagtccacgggtcgcccaccaccttacttcaacctcatctcaaaccgtcccccccttccatcccatcccatccaacaatatccctttgaaagtttctttctttctctcaatctttcgttcgcctcgatctaacatggcctcacccacccattccattctcgagggctttgttgctctccgagacaggtcaagccgccgagaagtgtatgtcccacgtccaaagcccatagtcggatctgactgctgataaaaataggctcaatgcgattcttgataccctagattcatatgaaatacgagaggtgaaaagtcgactcgagccggtgacattccaacttgatttgctaggtaagctgcctattgaactggtggctatgttggtagagtacttggacctagcagatcttgttatccttcaaagagtatgtcagcatctgttcggatattcgtgaccaacatgttgacatttcaaaggtctccaaacgatggcgtgaattgctctcttcaaccatcgtcttcaccactgcagtcagacaccacatgggagaaaacatcatcaagtccggttctacccctatcggttttggcgcgctggtaaaaaaaagaattcgcgcggaaaggggaattcctgctgttgtggccacaattcctaataacttgtgttgcaatgtagcgaacatcatggagagagaggccctaagctgttttaatggagtatgcgcgtggattgaaaaatccacagatcaaactactatattcatggtgaacctatcaaccggcaagaacagaatcctcacaacagcgaatcgagagagatttatttatgtccaggtctcggacaccttagtctcagcaatttctgttcgggggtatgtagccagaacaggaatttcactttgctgaatgcacctctgactggacacgataggtattgtcatgtctggaacatatccgaagaacagtacaagtcatttcgcattccttcgctgaaatttggtcattacatctccatcggatccaaggtcatgctgggctactcggattccgtggtccacttctgttttgactctggaatcgcccgttccatcaaaatcgggccgttcgttcttttgttgtcagtacatccggaggaagacggattctccgttgtttgcgtccgcagaaaaaatggcgacaatactcaagcatgggcagatggccacttgtattgggaagagcatcatttgcagactcagaagttctctgtccatgataataggtttatctgcacgtgggagcaatatcgagagcttcctttcagacaagacgaactgtggatgtttcgatgcaaaccagaagatagctggccaccatggagagtgtgcccgcgccctggtcaaagctctactttgctggattacgatatgaccgaagcctttatggatcgttctcctaattatctagaacacgaggatgaatatggctcgctttcgctttcactcgaggcggatgatcggattactgtgcatttccgctgcgaaaatattcaagagctggaattcaattattcttacactaatctagactatgcagcccggggcccggggttgatttattgtttagacatgatgttaggggatttgaaaattggctgtgaatttccagagctgtggcatgcccgcgatgctgaagcgtattcatccttatcctttcgcagaataccttttgcagctaaccaggcacccaccgcgatttggggggatggagactttgctctattccttgtggatgacaaaatctggatctggtgttttgatgaggcatggatcccttctggcatccctaacatgaagattgaatttcgcgatttgactacgcgtacaagaaacaagaaatgactataccaactagtcagctataacccctgtcaaatccacctgggcgctagcggatgattgcagtcaatacaagctctttgttaagcaatactgtatgaataaatatgtagataccccgatgatgattagaccagggccttatatgcatgtgagtttaaaaaaggcagattgtatcacagaaaagtgtatcattattagggggtaatttgagatataataatagtacaatagtacggagcactatggaggtagaactacggagtatgtctagccagtttagctgtagtcaggcatgaaccctttatcatcaccgaatcccagttaaatgcctcaaagcctctttatcctttgatatactccgtatagcgtgttatattagtgagaattaggtagaatccaggccaatagggctataaaagatatggagtagaggttagacaattaaagtaatagccctgtcacccctttttcccagataatatgctaatatatccaattggactctttcttttccttcatccctgtttaaactcataacttcctcattttttctgcagaccggactgtcaacgcatttccggcccccttccccgcagagccttttcctcaaccttccagacaacttcgagactttcttttttttttccctcaatattttttgttgaaaacaacccaatttctgcgcgatgacagaagtgttgattattggttgatctcccacgttcgttcggcacgagcataaacggtccatcgcgtccgaattccacccctcacgatcccgtcgcatccaccatcgatcttgtgctatatatacccacacccctccgacatgagtcgtcttgccgaccccccttctactaggatttcatttgccggggtatcagacgcccccggcaggacacgaaacatacctgtactttcgtcgtctggtcagcattcgatggatatcacccctccgtccacgggcgcgcatggctctgacgaccgaatgaccggaatcaccaatggcgctgaagctggaaacaatcttttgactgctccaaatgcggctatcggcgctgcggccgcagctcagcagccaaaagtcgtccagactgctttcattcacaagctctacaagtatgccttttggtcttcctgagtcttttgtcttcatcggcttacctttttgggaaacagtatgctagaagaccccagcatccagcatctcatctcttggtccggtacaaatgatagcttcgtcatgtcgccaacgtcggaattctccaaagtcttagcgtgcgtgctatcctctctgccaatgaactcgtctctgaccctcgcagatcatacttcaagcataccaatatctcctcgttcgttcggcagctgaatatgtatgggtttcacaaaggtgggtgtttcgcatgcgagctttgactgggcgatttctgaccatttttgactctgctagtgagcgacgtctttcacaccgggtccccggattctgcgctctgggaatttaaacatggcaatgggaacttcaaaagaggcgatctagctggtctacgagagatcaagcgccgtgcttcgagacacgctttgatccaccgtgattcattccctggccacaaggctcctgtttcgcagcccggaactcccgccgaacccgtacatgatgcgaccgaagctagatttctaaatatcgagcaaaccttctacgatctgcgtaatcgtatggctcgggccgaagaaggcaatatcacactgaactcgagatgtcatgctatgaccgaaagcctgacaaagtgctaccaggtatgtccgccgtctatgttattgcagggtctagtgctaacctgattttagtggacacattctatttcacggtttcttcaagctgttgtgcccgatagggaaagccctctacatcgcgatggtatgtcaatattgccgcttccctcatggtgacacccactgacactcgccagtctcgagcatgcaaagagaagttgagaaacatatcgaaatcatgcgcgccatggaaaccccccacgagaccctcatgcctccgcggcaacagtacttcgccaacatgactgaagccggtccacctttgtccccgcgccaaatgccccaggacgatgcccgtcgacagtccatgatggaccatacacctagacacaccaacatgatccgaccgcccgtccctccccatctctcagtatccccccgccgctacggctcgattggcggcgccaattctgcctcagcatacgctcgcctacaacctcctgttgcgccgcccgcacagcaaccgatgcctcatcctctctccgtatcaacgtccccaggaccaaacttgacccgccgtcacacgtctgcggatatccgacagcacggctggtccccctcggctggctcaccctacccccctggcaaccccccaaacggcccttggccttcatcaccagggcaccgaaccccggtctctagtgaccagcaagtccgtgatgtcctcgcccaatacgaaatgggcgccccccgccgccttcgagaacaatcccgccatgccactccaccaactgccgaaccttcaccgtccatgctcggtgtcgataacggctggacacttggtggttcaagattccctcacggctcttccttgcccgcaacccgtcgctcgagcatggcgagcaatgtgcattcattgctcaatcctgcagatactgccgaaagacccgacgaggaccagcaggcgatgtcagaggaccgtaagcggaagcggttggaatgaatcctacgtttttggaagattcccagcatccaccattcactaatgctggcactaccttcttctccaatcaagtccccataccaccgacaagccatgccactcccctcttcttcccctgctcttttgatctgcatatgtactattcaccagagcaaaagggcacccatttccaggcatctggagaatgtccccagctctgacctcatttttttaattccgcctgtagatgtcccatttcccccatttcttctccacctttcatcttttctatttttggatatttaattctggcgaaggcacgccaatcccggcccttggcctaacggcctacggctctccgggtctccatacttcgttcacacacagcatatcatatatacccttgggttgggcggagcaaaaaaaacatttgaatcttgtggcacctagagcaagagactggaattgaattgtattttatatttgcagtttgattatatcaattagaatgatgttttttttctgcactgtttgatcttgctattttgttggagtggcacgtggcacagcatggcacagcatggcactcagccgagtatgtatgcagtcttccttggtcgtgtctagccaagggacactgcgctgtagtctctgccgctggcagagtgaggcctcagcgggcgatccggctgtggcggcatgggttcaaccccaagcccctgaatcaacggcccaatcgccgtgtctggcgcatccgaagcgacgaagatcaaagcctaatccatcaaagaggacccagagccaggtacggagtagagctcgcgcaaagctcgtgtgcgtggtaacatagaatcgaaccgatcaaccgcaaatcttcatctcttcttcctcttcttcgcacgctcagccaaaagctcatcaagataactcgtagccttcttcctccccttcgagcgcgcaggagcaggcacaacctcaccctcaccctcctcgccacctttatctctggcctcagcagccgcagccgcaggatgcacaccacgacctgctccagccccacctttcctcttattcttctgcctagcaagcatagccgagcgaccgtcctcttcatcatactcgtcctcgacgtcggctttcgacacactagccgaagcagacgcagccgcggccgtagaagcagcattcgccgccttctgctcggcagcggccttcataacgcgatcgtagttcttgccgaggagttgtttacgtagtttatcgtttgagtccagctctgtgcgattccagcttccgtctgctgctttttgtgggaggggggctccgacaccgaggctgtgagttcgttgtggttagttcgtgcattgtagggtatatttggtggaattggagaatggtggtaaggtatatgcctagattgtaggtggagaggtggaggagcactcacgtctctggcactgcagtgaagatttcatcttcttctcgttggagctcttcgtcggtcttggggtttgctagctcttctggtgtctgttgcggtagccatgaggctacgagccgttgactgcgcgatagagcaatattggcccggttaaggatcacatcagactcgcttttagagagcgacatattggtttctttgcgctcaatgtcgggttattggcggattcgaatcggtcttttgtggttgggatctgcgatgcctttttttctgccgatatagcggtggcggtgagcatgatctatagactgacctgcatatgtaagtaactatacgtaccggattctccctggcgtgtggagctttcctatttgatctgccgccactttcatgagggtgctcagactcaggctcactgagtagatgtcaccacggactcagatcagtgatcatgcttagttcagtcacgtgtagaatgactgttgcagcctaccgcagactatacccagaagggattagcccccacagggtcgtttatactgtgatagttagttcgttgatagcattgctactgccctcaatttgtgaaatgctaccgacacgcgaaaatcgctaccgtcacgttgcccgccatactactttaggtaagtctgccatctctttatcttccgcttaagtcggcttctcgggagaaacgacatgacttcggggagcatgccactgagtctcagggagaaagaagaaaactgataacattccaacgacggtaaatggcagatgaatgatgaacaaatatctccagccaaggctctcggctattacgccacccaggatcgagactagagatataatgcaggtccatgtcatcactaacagaccagtccggagagatcgctggtgaacgaaacaccttttattctcccagtcagcgttgtaagacgtaggcaggaggttaaattgacacacatatctcccatgactgcaacagtaaaactcccaaagaccgcggagctaaacccttggataattcgccctgctaatataacattgtagttatcgctggttgtgcaacatacaagggttccaatgaatcccatgatggtagcgaagataaattgtggccgtttgccgtatttatgtgccagagcagatccaattggtctaatcatatattagctcaacgcccgtatcaagacatatatgagacatacccgtaacaagcacacgcaagcaattgatatgcggtaagcattgtgatatcttcaatagatcgctgcacagcgtgcgacatcaagaccatagatggagcaatcaggggcggcggaatggaagagaaaataatcgaattggcgaataagacacaatatatcaaattcttcctccatcgtggctaattctatgcggggtttgagattcctcgctccattacatcacagggtaccacctaccagaggatcgtttgggctgttggagggctggggaattaagacaacgcttgcatgctactcttaggatattttcttcgttttgccggttatcccttctgtaattacctttccagtgccaaactttgtctgggaggagacatgtgtggatgattcatcgaatagtagaaacgttccaggtgcatggcgctcattcagttgaatgatacccaaagccattttgtatgatatccgatagagaggctcaagttatatttgatgtaaaggtttgattcacagattagaagattagaacctttttttcgcccctgcctctctcaggggacgctcttttatatcctcacgcccccatcaaagttttcctggggaaactatggcggggaacttcggcgtctgcccagatattgagcttgaatttatctcatattactagtaccaaaacagatcatgaaccactgtcagtcaaagtcggatctatacaccacataaggttaatgccaagcacacgaggaaatagtcgagacccactatataacttcacctcccgcgaagccctggactttcctattcaggtagtgcgaataacctggggattgtgacttgttgtcaccattgtgccggagataggcatacctcgcagatattcaaggtgttaccttgggacaaaacaacaaccggtgccctccagggctgcctacctaggtacccgtggacgaatggagacctcactaaccgggatggaccctgtaggagtagatcagcgccggagtgttgtgaagggatattgatcaagttgactccggtccggttggttgataaaagttgggtgttgcatccaaaacatttgtgggcttaacaggttggagctggagaaatttggaaggttatccatggatgttattgttccacgattaacacctgttaacacccaagacattaggcaataatccgtaatacttctttatcacctccacgcccttcttttctctctgctaagcacttgaatttaacaacccgcttgtttatcaacttcaccagagcgttttcatttcttctgaatcttgaagctactcaacctttcgtctcctttcccttgtcgaaatgtctcgctctaggggcttcgtcgtaacgatcccctcgataaacttcgatcacctgggcggcactgaaatcaaactcgaccagccttccctctcgccccctcgtacgttcgttattggcgagaaaatatccgaagattaccaaacgatgacccaggaggaatatgagcgacaaccggggcctccgtttgccgtcattaagttctcttgtcacagccttctagaccctactcagcagggcttcatgcggatctatatgcagatccctcttgatggtaccctttctagcgttccagaagtccgagcccagcaggctgtaagccagtgcacccacacggagcttaaagcgcttgtatctcttgatcgcgaaaactgcatggcagtaccgaaattgcttggctatggggaagggttgcaaggtgtcgaagaatttgtacctggtggttacatcaactacgttgcgtgggaacgggtgcctggtgagcccgttgactactatactttctggaaacgcgactttgaataccgccagtgactacgttccgcctttcgtactgcctatgagtaagatcataacccctacatgtccaaaacttcgagaactatctatactaatacaacgaagagaactcagtaggtgttcttggcaacctggacttacccctccgagcaagattatctacgatgatgtgaccaaggttatgtaggtagttccgacattctattcaactaaccaatctatgaatgccgatggtgatgagttaatcacttttaggcacatttccggattccgaggagcctatccaatggacactgagccgttctaagacgagacctacgtgttatggggattggaaaagccatctgacaggctggattggtatactgatagctcggactggacctggtgaccaatgtggatctccgtacatcgcttctttgacagtcgaatggcctttcgcatatgggattgtattcttgagttgttcatgatacccagctaccctagtatgcatgtatctgtcgctgaactagtgctttcaataagacaattgtagtgcctttccgctaaagatagcccttgatactatgggagacttacaacaccttagaatcattcagcataaatgatcagatgaaatttccgaagctactctttgacactctttgacaacgtaatatcgtcgtcctgtaactcgcaagttgcaagtttccctcagaaatccaatctgatatcagtattcaacatgggtccttcatgcataatgccccgacaaagctgtagcctcgatgctatcagcttcattaggaataaaatctcggctttagtttaatcatcagctttggcttgttccatagcacataacattcttgatccacccagtccttttcaggctggtccaattccatatcgaagttgaagaccatgcgagcaagaatgatacgcatttcgacatatgccagactagacatatatatgagcaaaaagcgaatacagtagagacactaaaaacttacttgcgtccaatgcagttcctaggaccgaaactgaacggttgcattgcaattttactgtcattcgagaaacgagggtcgtccaaatgccgctctgggataaactgctctgcatcggcaaagttggcaggggagtgactggcagcgagatgggagacggaaacaacggtctataaaaggcgtaagaggtgctgtatgctgtatggctttttaagcaagctttgtacttaccccgcctggaacccagttcccagcaatcatatcaccctgggcatcaacaatacgaggtaatccaactgcaacgggtggatacactcgaagagtctcagtgaggacggccacacaatactctagtttattgcaggattccaaggtgatgtcttcttcttttgcaaatgttgatctgatctcatcttgaagctttgccagaacgcgtggatttctcagcagcagatacgtcaccccagagagcacagttgcagtggtctcggagccggcgatgatcaacgtactgccattggtgatcatttctgggatgctgaatcctttctcggtatttcgatacctcaaaatgttgccaaagaaatcaggtctctcattagacttggctatgcgactctggactttttcctcggtcaaggctaggtgtgtattcctctgcgagaggacatacttaggagtgatgtatgggaggatgtatttcgatcccgggaagcgtcgagacacatttgcgtaggcaccatacttgagcgaactgaagataatggatacccattggtggtaatccgaattcttgagacagtcgaaaggctcaccgaaagccaggtctccaataatatcaaaggttgtgaagttataccaggccaccatgtccacggtatttgtgccactatcgatattctcatgcaagcgctgcatcaaaagatcaacatagcctttaattataggttcctggccgcgcagtgagctatcggagaatgcgtgcgacaatagacgtcgaaagcgggaatggtcggcgtcattggagatgatgatactgggagcttctccagcggttggtgcatagaatcgatcatctttagacttctgaccatggccaacacgtgtgccatagattgacttccaggccgcgccgtctatgaaagaaagttcatcgggggcaatgcgaactacatcgccgtactgttgatgcaatgctttcatcttttgtgggaaccggccacctaggatcatgcgaatataaggcagacgtgtagctgccatagatttaggtccaggatatttggacaaagggtggaagtagacattataggccaggagaccgatgaggtaaagtgggatctatttagaagtaagcccttagttagccgaattccatcgaaacaacctgaaagaccagcgtatacttaccaacgtcaggcttagcttcagcaaagcgggagctatatttgagaagtcttgcatgtttaaaagtgccgaaagaccaggaataaccgctatgattagggctgtcaagcataagattcgagaatattcacaacatccacgacatttcgagagtacttatactcctcctttcctccttgccactctcacatgtgtgacataaaaacttaatgcacaaaatctctgcattatgatgatctatgaactgagaccccgcactctgcatagcacgattctagcccaacaagaggcctgggaatatgtacatggcccagcttggtttcaatctaaatagatattaggagagacttgttgtcctttgaatccgagaatctcttcccacccatcccttataaataaattaggactgggtattcacctagatgctttcaacacacagtccagacattttgaataaggatcgaatgttgaagtctcatataatagacacaccgtcattggagaagctagtgttccaagctaatgtagccaagctcatgaaaaccttccctgggttggtcgcggcccatgaataaatcttgatgtaatgcccatacaaagggtacaaaatccgtgacatccatttcactcagcccataaataagactaatatgtaatttaagcacagttaggtcgttctatcactaatgtattctaagcaaccttgaaattagtatcgaagtgcgagaggcaccttaaaaataccatatatagagattgcatagcacctcaaagtagtatgcttaatacttatcaatattgataccaaaatacacaaagtctatttgcatatgtatacaagagctatattttttatgaatctcttatcctttgtatgagcatgacataaaagatttatgcttgtactagcaatccatgtatgtatcttttttatgccgagagtaaatataattctgcgcaggaaatgcagcataaaggccgtgtttactgggcaatccgaagagccacagactacgatatccacattgaacaataggctatgttaatcggagaccttctcaaatggccaaatttactctgagaaagctgggctaaccagagaccaaaagtcttgttactatcatgataattacaaatatgtgtgtatgcgttgtagtacatgtcgtcgctatgtgtgccctctgcatccatgtggcaatccatacattttcagtgggagacaatcatttgcacggaggacatcttgcagcatttctaaatcggtttgaggaaacatttgcgagccccaagaaatgaattatattcctctgtggagtcgaagcttgtccttccctggtgaggaagcatcttaaaaaggcagtgagaaaggcctgcaggaattccaaggttagcttatgaattgaatactcgaaataatataatggcctcattcaagactctgtgtgttttgaatcaagtccttagaatcttcattttctgtgcttttagttggattttgactcacgaatccaagataatgccatcctcctgtttcagctgaccatggtttcatatcaggtaataactgactgtcattaagtatgatgtgggtgaattgctctaagctggggggtccatttaacaaaattctcagtaaagcctgttcacagcaatacatgatatttccattaggagaaggaggagtgtacaggcgcagaacgcaaaaagtagtatgatccgagtctttcatgagctacttgtcgtgatgacattttactgaacacagagcccgacaagacactctggtagaagcatcaatcgcattctccaagataattcgaggaacctgtgcggtattaccggcgtcacactctccatcaataatgaatgctgcaggtattgctgttaatgataccgaaatttgcttggtgaaacgtctcacgggcaattcaagtttttccctttcgaattatcaaaatactaatgatcctcagggtcatataaggattacactaattatatcaatgtctatactacaatagtctgaataatctcttcaacaaggtataaaaacgttatggcatcatttatgtacagtctatctctatacctgatactgtgtctgatctagacacagatccccattttgttccaatgtagtatgacacggggtataaaaaaccgagaagcaaccaaaatcagccgcaagggctcacactgtagctagaccctcatgttgacgtttcacccgcaaccttttctcggttttcatgaactcccgaataccaacagggatattggaaaacaggtcatcgtgttcagacggcagtgtccagtttgtttcgctgccaccgccatcatcatccatgcttccactggctgcgcggacttccgcccgaggtgcccagcgcatgtcccgtgttcctttctcaggcccacctttagctttagccattgtgatcctggatgcccagtcttccatctcatcccggaagtcatcccagacacagtgaacgcagccactcatgcagcagttgtccggttcctcgggttggggaggaatggggactccgtttatagttttccacattgactctggaggagcttcaccaggattgtagcgcgaggttcggcctggaccggtgagagggctgccaaaaacgatcgccattctttcttggggcgattgcggtgcgacagtagatgccggcgtcggtttggcctcgggccgagtgggtgtcgggcgtgatgtcggtgcaccaccagcgtatggcgagttcgatttcaatatcaatgaatagtatcctgacagagggtaggcctgaagaggctctgcagtttcctctagggaagctggggtattgggttggtcggattggctgtgtccgttcatgcgccggggagtcggaaccagcacatattgtcgatatgaagcgaatgaaggatccgttccaacagggaaagagcggatttgagacacggagctccgcagccagtgtcttgtacccgtcaagagacactccatagtgtgagttggagaaagacaagaatgttcgtgcattgacgaagggaaattaggtcataatgcaaacactgcaaacaattcacgattgtttatctttctgaggtcatcatctgggccagacgaacaccccacgcagcaatggattccttagcaaaaaagcgaaaaaccaacgagactacaggcattcctgtagcgccagagattcctcaaaatgaagcccatcggtcgagacggccctccttccagtctccaacgagggccagtcttgcacgatcacatcccgatttattagagcgcgcaattagcagatctcctgtccgacgaccagcaagcagagacagtgggcaacaagatcctcgaaaatttggattacgcgatcgcaaagcactccgaccttcgctcaatgcctccgcaagtcccctcactcgacctcgaggctctgaagcgcccgaaagttcccccagcaggcgctcaagtggcgttcaagcgttctcaaaacccccgcgcaggatttcaaggaggattttcccaggagatttagtatttggatccccaatgccacagccaaagaatcccgaatcaaatacccccgagcgtcaattggcattggaattgggtagcgccacaagagaagcatatatggatatggatccggactccggtttcatggatgaagatatcctcgaacccgatcttccccccacgcccacacaattaggtctagaaaaggccccagatcgacccaggggaatgttgagtagcagccccagtaggcgacaggagaaacgagcgaaacgaagaactatcaatgctttgtacgaaagcccacttaaggcagtgaacttccaatcccctccgctggaggacctggagacagcttcagacttgggtgaagtttcagcagctgttcgcgagaaacgcaattcgcgcgagaagagcgctgcagatctgcgacggctgagaagcgaagttgaaaaactggaacaatgggcacacaaaatcgagtctaatcctgactcggacggcgacacgagaggactcgacgaatttctgtaggttccacaagcaaactcggcttggatactgctgacaatctctaggtctttactcacatccgaagaggcgaatcgtacaagtctcccagtaccaaaaacagcccctaaatcggtatcatccctcctcgccactctactcccgttctccgccaatatccctcgcccaaaacggaaattatcatcgctgccgacgaatccatttgccctgcaagaagcctctcaatcactgccatacctaacagccttcgcgcccttgaccctcaaaacccgtacaactcggtcatcacgtagggaggagctgttcgaaacacacacactgaccttttctcctccatctccgttcccagcaagtctatatcatgtgactgttgtctatgagacgaacctcgagacccagtctttgatttctctgtcagtgcctgctggcagtgacagcaagaaaagaaaagtccccgaagctctccgtcgatggatcaatactcgcttagagaaccctcttttgaaacttgacgtggcaactctatgctggggaataaaccgttactgggaatctgcaattactcgcgctcgtttgtgggcacacattgaccatgagtatggccctcgggtctctcagggtagaaaggatactgcctcggaaagcaagaacggcctcatcagactttctgaactgcgacgactggtcccgcatttagatcggagcgcgatggtcatcagccctaaatcccctgactccagtctccgagtgcttttgtcaaatactttggtgttggatgaatggaccggagagcctcagctgcggcctgagattagcgtgtcgatccccggggtagataagaagatcgatcaggaggccaagaagcttttccatgcgttgctacgtgaggatggcgctttggtcacgcgaggtatcgagggtggtatacatgttgatgcggtggtaagggcgactgaaggtgctcttggtgctttgttcggtggtctttgatttttttttggtattccggtgcgattgtcagcgtcaggtgttggagtgatctcaagatacccgagcagagctcacgtgttcctctaaagtatgagataatgaattttctgtcttataaacgagctgaattagctatgtaatcagtcactgattgtattgcggcacgttcatagatgcagtaattgattgacatgctataattcccatccgaataggcatctaggaaacttaaatcgatatcgaagctacaaagtatatagtgaaatcaactacaagggttcaatgttcttctcgccggaagctcaagatacaacgcctagacaaccacaaaattatgagatgtacaggcacaaagccgagattgagagaattgggcagttttgaatttcgagagatcttccgagttctttcttttagagacaaaaaggagtaaaagttggggagggagagagggaatcaaggaagaggcgtaacgccatgccacagtacactaatccccgattcgaaaaccgacccgatcatcatcatcagcacgaggagggaattaacacatttatttcttggcattggcctcatcatcagccttggtcttggcacgcttctcgcgcatacccttgtagcgggcctcagcgcgggcgtcacggagacgacggtaggcagcctcctcgcccttggggagggagtcgcgcttgacctcggtaacggcctcagcagcggtggggttggtgatggggaaggtggcctcaacacgggtggcgatgccgtcacgcttgccctcagcgacggtggccttgacggccttgacgtcctcagcggaggagtcaagcttcttgaactgaccgctcttgcgggggaagaggatcaggcgagccttgtagtcctggagacgggcgacattggcaaccagagactccttagagtagttggtgcggcggtggtcaacggagataccgacggtgggagcaagcttcttggggataccagcttcctataaagcgcaaaaagaaacatgagtcagcaagttgtttctccgtaacacctccactttcgacgcggctcattttaccttcagctcagcgagggtgaaaccacgaccggcacggacacggcggttgtacttgatggtggggcatcggacaacgggacgcagcttgtcgaccggacggggagcaacagcagccgccttagcgatgcgggcctcacgacgacggtgcttccggccgggctgtgcgattcatgttagtcggccaaattcatatcctgcaaagagaaaaatttcctcgattccaagtcgcttgcgatatcgttcggaataagagaattctctggtcggggggagggatgttggatagtcgtacctggtcgaagtgcacacggacacgacgctgccagtccttgtggaagtctattcaagaattcgttaatcactgttccttcaacgtctggtctccccaagcctctctgtccgtttgaagcgacacatagagttgcaaaagcgacgggtcactcacggttcttctgaatctggttgttgtgcttgatcgcctatatatcccacacacaatcggtcagtcaaccatttctttcgttcttttcgaggcgtatttcaatccatcgatttctctcaatcgcacaagtcgaatccttcattgtatctctcaagcagggatagggaacgcaccatggtgacggatggggatcgagccgggtggtggtcgtcgagggttgctggtcaaatcctcttcacggcagaaaatgaagttcccatttttcgtgtggccgcccgctgactggcacaccgcctcgcttagcgagccctaaccaagccgaattcggtaatctgccagagctattttttattttttatttttcatttctatgcttgtctgcgacgatatcaagcatggaattattcaatgagatcatgcttgaacttcagtatattgtttcaatgttgtaattcgattttggtctctgaagactctatacctattgtacaatggttgtaccgtcccaaattcatatccccaaattcccgtctatagctaccctaagccataattcccataccgaaaagacaattgaataacgccacatgtgaagggccatggatcactgtcgcatggccacccaaattcccccccccccccccaaaaaaaaaaaaaaaaaaacagttcgctacttggaaacaccatatttggcatgtcttcatcattcgtgaggttcccataatcgtaacaagcaaagcaacgctaggtcatgaatcatatcaaagtcagtggcacgagttcttcaagtagccacgggatatggactcaagcattgatgcccaggccaataccattcgtagtcctggacttcttcgtggcagcaacgttcgcgtcactgcctgccttgcgcttgccagcacgagatcgatccacaccaggtttctgtacctgtccaaacaactttgtctggagcagtgtgctgctcttggggacagtggagcgcatgtgctgcggggaggtccgagcttcctctgcagcctcggaggctgaaagggatacggtgctgtcgctatcatagtgatcctctcttgggtgcccagctggagtgatgtactggttcttcgagtggttcggggtgacggggacagaggttgcagagtgactaccataagcgtgcgtctggttggtgagtttatcggcatagagaagagcggcgagaccatctgcgtgttcaccatgacagagattgtgtatatcattctgagtgcccggtgacatgctgccgtagttgaagatctgagaaaagtgcttgcgattgtcaccaatgcggcgcttcagcataaggttctgctcctcgaggtctatagaccgactggtagcttcatcaatggcacgcttcgcttttcgaagtcttcggtctagaacggtattgagttcttctaattcctgcgagcgttgaacagccgaaagataatcaaagtttaaggcagactgggactggttgggcgtaatgggatctgcagggtgcgagcgactgcggtactcggcgctctgaataatttcgacttcgcgcttggcgagctgatgctccacctcggcacgcttgacagcttcattgcttgcgaaagagaccaagctgttctgcagtttgaagtgcagcgcagacatgcgcgactctcgggctacggttaaaagttccttggcaatagtgcgcagttgtgtttcgctggcgttgtcgatatcctccatggtgggcaggttctcagaggccccgtaggcatcgcacaacgacttatccagatcagtgggcttcaccaacaaagggctcaaggagcgcgagtgtgagcgagaacgaagcggggcccctgggatctgagatgagggtggaggggtcatatcggatgacgacaatggtggaggtgagaggaacttcttatccgactgggacgatgggcgcttagccatgacgctgagctccggcgatggggacaaagtggcccggtgggctggagtcgagggcacgatctccgcaggtgcacccagggaactttgggagttgaagttttgagacatgatggacgtgtggttataagtgagctgacacaatagtatatcacttcgataagaccacgagggtttagccgtggggagacgggtcctcacactaatttcttatcagcctctttatcgtagaacagatcatggacgaacaaaggaattatctacataccgaagacagataactatcagtcaggacttgggttcggtcgatcacacagatgctcagaccaggtatgttgtctcaggaaccaacagaagatgggggatctgggggtggagcaaggggaatttcaatttcgagctaagacgacaatgactcagagaacttgaagaagaatgaaagaagggagaataatggagttgagtgagaccttaagaggaagaggttaactccagcgttattgggaggggctgggaggctgggaacgggagagtctcaaggtacccgctttgggttagtccatctcccagccccgatcaattatctaagaatataggccaatcagaggtgagtatacagttcggccaagcctatttaggttagattggcgatcacgggacgctcagggcaagtaaacacccgcgaccgggcaagcgctgggggttgggtaggcaaccgataagcatcaagatctgtacggagtatatgtatatatgatatcatggagatgttttgatcttgatgctttgtctatcggaggcttgagatgttctgggagaaatttcgggttcttgcataacattagaagataaaacaacccaagtattacaactcttcgaaccgatgaaacttgagattgcatataacaatcaattacaccgtagctagttagaagaaagcaccatgttatgtcagagaaatcagacaagaagacgcaagggcatctcttagcagttggtaccagctcttcggtggcaaaagtaagggtctggtctttgtaatctctactaatatctgctaccaaatgaatattgagtatcggaagagcattatgcccaaaatataattgtttaagcatgaagttgcgctggagaactatttgtttgtaggtgacagctctttgatatatatccgacaccataggccacgggtcaaataaccgccaaattacaatgaatccatggtattccatacttgaagaatagatctggatatgattgtagcaatgcatgacttagaatgatgcatatttgttttatatctgcttagtaccaaatatttcatggatcgggactaaatcggtcgatgcctgaggcgacgatcgcgggattgtgagaccttagaaatgtaaacaatccgcttcgtccgaaaggtttctaaacctctagttctttattcctttgcgtccaagacaacgattttgataggactgaaactgctactgcgacttttccccaccctccacattctttctcccgcttcttatcgtcgggcacgagcgtccgaatttctaaacgtgcgactctctccctgaccaaggaccatcatcaatagctagaacgccaatatggaaggacagtctaaagcatcaacacgccctgcgagtggtataccacgtcctgcaagtggtattccacgacttacttcaagattgcctttacccacgacaactgcatcaaaatcgatcaaaccgtcaccttcccgagacagactacgagcggatcccggcctggacgaaaaaagattgcgaagaccatcttacaatacactcgtgaaaaaaccgtcctcgcaccatttgtcacctcccaagccgcaggtcgatccaaccccggccctcaagcaagaccatacccaaggcggggaagacgatgcacatgttccagaggagacaagctcgattgctggggatgatgacattgtttcaatcgaatcggcccaagaaacacgcggtcgccgtggagtacgcccatcgttgtccgagcgtacacttgaaacgctagcgcaaattccaccatcaccagcttctgtgggaaggcagtctagctttttcaatggtagtagcccggtacgatctcgatctcgtgccccgtccaatgtgtccaatgtctcgagatcgccatcgggggcctcattttgcgcgccgcccagcaacgagctatatatacagcctgtttcgaagctgcgttttccctcgaaggctcctgcgtcgactgctggatctctttctccagtccgcggcttggaggacagtgtgagcccctcaagattgaagcgcccgtcacccagacaaggtattgcaccgggagacagtatccagacggacgtcagttcaccgcttaagagggaaagaccgattgggaacagggatgcaccaaaaccctcgcttgtccgtccatcatccagcaaatcctccacaaagcctgctaagtcagacatgggtcctccagaaagacccctgcaagtgaagaaaacgagaaaaccaaaaacagagcaggtgtcgaccttacgctcttcctcgacggcttccagatatgtgtctgcttcttccaacatgcctgatgacttgtctccagagcaagaggcagaacttgaagctagaaaagtctctaaatcgtccagtacgctgcgtgaaactatagcaaaggcaaaggcagctcgcaaagcgatggcggcaggagaaaaaaaggaaagcccaaaaaagccagtctatcaggctccgcctatcgatgcgcctatcgattcctgggtgggcggcgacgatgatgatcctttcagccaactgcccaaggggtctaactctttggtgatccgaaagcgcgtacagacagcgcgcgcgaccggccagttgaacatcgcggcgttttgtttaaaagagattccaaatgaagtgctgacgatgtacgactacgacccagataactctgcgaactggttcgaaaatgttgatcttgtcaaatttaatgccgcggacaatgagctggaacagatctcagatgccaccttccctgatatcaaccccgaggagtttgatcccgatagcgatgatcgaggacttcaatttgggggcctcgaagcattggacctccatggcaatatactcaaatcactcccgattggtctccgacgtctgcaaaacttacgcactctcaacctgtcaaataattctttgaccatggccaatatcgagacaatcgcagagataaagtctctgacagatttaaaacttgcgaacaatgaattgcaaggggaactaagtgcggtcattggtcgtcttcctaacttggagtttttggatctgcgtggcaatactctcactaagctcccaaaagagcttgttgggttgagttctctgagaacattggacgtcagcgagaacaaattcacttccttgccgttcgaggtcctcagcaaacttcccctgagaacgatcaatgcgcagaagaacaggctggaaggcactttgataccggcatcagtgaacaagttagagaaattgcagtccctaaacatcgccaataatgctgtggtggtcttctcagccaacgacacacttgaacttcctaatttacatactctcctggtcggtgtcaatcgcatcacgcgtcttccatgtatgacttcctggcagtcactattaacgctgtcagccgaagaaaacaaaattacagagcttccgcaagggtttgaggagctcaagagcctcaagaaggccgatttcacaggaaatgccctcacgcgcttggatgagaaaattggattgatgcaaaacctttcctctttgcgggtttccaataacccacttcgtgagcgcaggctgctgagaatggacaccgacgatatcaaacgagacttgcggagccgctgtgagcctgatcctcaggacacagatgatgagggctcagtggccacgcaattcactctagcgcccgagaatcccgtgctcgatggcagctggcagattaaatctggtggaactcttgacaagtcttatgctgaaataaccgaccttacggtggaacaactggagatgcttccgtcgctagacattcgatgcctctatctacagcacaatgagctgagctgtttcccagcccccgcaattgaaatgctcgcacagtgcctggtcgagcttgacctctcacataaccccctgagtggtgctaacttcttgtcttctccgcttgagttgccaaagcttcagtcgctgactttgaatgcggctagcttgacgtcatgggagcctctcttgtccaaattaatagccccatctttgacattcttggatgtatctcacaatcgtttgaggggaccactcccccgtctgagacagacttacccagagctcaagacccttgtggcctctgacaaccaaatcactagcctagaatttgaagccgtaaaagggttgcaggtcttggagctaagcaacaatgaccttgattcgcttcccccgaagattggcctgcttgctgctggacgctctcctcagaattggggcaatggatcggcactgagacgttttgaggtggctggtaatcgattccgagtacctcgctggcaagtagttgccaaaggaaccgatgcggttttgcaattcttgagagagcggattcccattggtgacctgccggaatgggagcaggaacacgaagctcccgaagagttctaagacatgggatctagttggagatcatgatttagaaaggcttgtataatattaccatgtttgtttctatgtacatatacataatatcgctgtccatgcttttctcgggcttttatcatcccatcatcagcttccttgaggctttgtgatggatattcacattcagctttttacaattgacttgctgacctcgtcaatcaccttgagccacgtgttcgaccatgtagtgaacttgtcggcaggtgcatcatccttagcatctgcagcgccccagggtgatgcgaccagctccaccgcttgtgtggcacactttctcgtcttctgtagatactgggcagaggtttcaaaattggcctcgtacaacgcgccagctgcctcgtcgacatcgtccgggatagcttgcagattcagcatcaaggaatccagcttcttgacacccgacgaagaagccaacggtgcatttccggcgttcttcagccggttgttgatgatagctgggtaaacctgggcaataggcttgaggaaacggagggtagatttcttgtgttcctggagggcagcggtctcttcttcgtcatcctcatcatcatcctcgtccttatcatctccggccttctcctcatcgctgagaatatcatccaagaaaccatcgtcctcttcttccggatcccagtcctcgatttcctctaccgcgtcgcgaaccaggtccctccactgctcaacgcggcgcataacaaacccaacaacccctttattcgcaacatcggtcgtggaatcacacgcatcccagacacggcccgtagcgagcatcacagcatccttctcggatttcgtcacgccgctctccttccctgtatccttcttctcctggtctttcttctctccaacgagcttgatctcccgaaccagcgccgaaaattccgtcagagtcgtcttgacaagtaccaggacctcggagtgaaacgccttggtgtattgcgccggtgtgacgagaagggatgcggtcacgagcgacggcagcacggattcattgagctctcggagcacggtgctgacagcggaatgcgtgaagggcgaggtaatagccagcagggagagttttgtgacgtgtgctttgagcgcgctcgaggaggccgctagtaggggcagggcttcggcatcttttgcggcttcagttgcggctgttgggagcgtggtaagggctgtttggaattggctgatgagggttaaggttgtgccgaggatgccggatagttgtttggacatcgtgagggtcgtgggctggccaagggtggattgaagaagagtgtagtagagaaaaaattcgggcgataattatcgcggggctgattagggctctgcggggtcacctgtggtttctatgtcaaagctacggagtaagtcggggtgacggcgaaaagaccacgtttgcgcttggctcttggaacacggcaacactatcgccattgtacgtggtctttcgaggggaaatcgtggtcatttcacccagcgctcgcgttagagcattgaatataacactagccaagttaggtttagcgcccttacaggagtaagtattcatcatacatcaacgccctcggcgcgtacattatggataaaagatataaaggcagtctaagtcctcgttcagatatcatccctaaatatctttaaccctatacttgattatctataataactgtagagagcggtcgaatcggtcttaacctggtcttcttctagtccccgtcgcggtgctcaaagatagtaatctttttgttaatattatcaagatatttgcctcggcatcctttaacgagctcttttagaatgtttagataaagttcccgttttgaacggttccggaggcttgtctattatatggcgcctcgtgaaattgagggaaagataccggttttcatgcggagacgagggatattctggaatgtaatgaagatctatctgtggttactttgagggcatgtggagtctgtcaaattctccggaagatgtatagttgttatcatttcttgagcgtggaatgtcgttatccctaaccaaggcgcgctgtattcagagttcactctacatacaagctgttagggtcgtttataccgtgatacttagttcgttgatagcattgctgctcccctcaatttttggagcactacatcttatcaaggagatatggtataacgaaagggcgtaggacggagtagagagccccatccgttcatgatgttacttccatctttcttctaattcggagcggctcgagcttaagatctcagatataaaagcaagctgtatggcagcattagcatgtaataatcagttacaggccaagaatagaaggaaccaataactttatgacgcttccagttctagttacgtgcaaatgccaagatatcgagcatttcactatcttaactagaagttttagatagacctaataattagtatcgcttatatatactgcgactttaagtagtaggataattaaaagactaaggatttactagtaggcttactaaaacagctagctaggtagtattagcctctcctaaatagtgttaaagagctctataagtactataaagctagaatacaactattagctgaagaaatttccaaagtcctcctaatcgtagtagcgatatttttaaaactctttattattattaatatacttaacgaatgccaggcattagaccggcagcattttatattagagctttttaaccttcagatacaatataatgtaaatatctttgcgacatcgcgattcatatcagaaattatagatcaattcaaagacaccttatccttagagatccgtgcgaccagtaaggacgttgggatgtacctggaaagccatgtgagacaactacgaccttgtgtataattggcgctcgccctctaaccgccgaattatcactctggcaagatcgtctattatctaccaaggttcctccgcacggccgggtagcctacctgataacagcatgtgcaacgggtatggcagttggtgtacaaacgggcttaaaaagtctgccagagggctaggatctccgtttcatggtccgggttgcgttatttagtcagcgctttccgagaatattaaactcgcactttccgcgtctttgcttccttcactcttcctactactcctccttagttctattctcatcttcaccatggcttctcctcaagatcccccgtcagacgcgtgtgaaatactcacgatctccgcaaagaactttacggagcacgcgagttttgccgagtctgtcaaaggcattatctgcgaggctaagcactatcagctattaaccgtgaccgacgttcctctcgggtgggaggacttcctatgggaggctgacgaagacctgccggcaaataggaagacctacgatcctatcacaggtctactacgtgtttccatcatgcctaccaatggtcacgatgtagcaagcggatggttatcacgggcaatggtgcggtggactcgtgcggggcttacgattcctcaagaagaggacattctgtatactatgtctgatgcgagtaagttactatgatggatctcacgttaaccgagctaattttaagtaggcattgacttcaaatacggcgtatgtcgaggctggagaaagcaacctgacgccgccttccgtatagtaggactgaatttgcctacgcttgtcgtggaagttggctggtctgaggggtatcctgatctccttgatgatatgaacaagctgcttgttggaggaaatggcgatattcgagccgttatcatcatcaagttcactcaacaaggcgtcaacgtttcaggcttcctcgaggtataccgactcaactcgcaaggcataccttacctcgcgcaagacgaaaccgtcttccccactccccaagggcaagcggccgctcagcagcaagtacgcgttacacgaagcgagctttttgggaagttcctcgttccaggcatgacgggcgcagatattctccccctcgatgtcgattggctccgtagcatttgccgctcccaaatcgcactgatgggactggttcctgtctaacggccttttcttgtctacacttgcttcactctctgctaacctacttgctctataacatcagtatcaatggaacgcgttaatatgttctggtcggtacttacagtaccagagttaacggccaagcagtcatcctggttcttgataattgcattactgatggtaacgccattgctctcgccaacaacagaggcatcggagttgtggccaccgttatcatcgccgtccgagttcttacagattcgcgattctaaaccgttaactggctgtccgaccaatagacacacagtattcgcctccaaccgccacattcaattggtggttccgtaccgcaagtggtacattgtctctcgtgcttctcctcgttatacaaatttaaagtcctcttttggcgctgcatgttacgatctggggctaagtggagctgtcgagtgggtcaatgcctgtaacgaactcgcacagagcgtaactcttgactacgaaaaggtaggcgttccagcgcctgtgactttcgtcttttgatttgatttgatctcaaatgtagagaactttcctggccagtcccaaaggatatctcgctgcaggcgtggaggactgatatttctatctcgctatatcaacattggatttgccattcttttagacatgaggcctacaggggattaaaaaagtagctgtaggagggttttagatccaggtcaaataaccgataatcaccactctttctgggctgaacgacgcggcctactgctgcgcgtatcggttttcttgcgcatactaatacgccgcttaatcgcacttagcttagctgatagaatcgattctttgtttaaattcgtaaagctatcttgtatccggatattcagcgtgtctttcgactcctgtattatattggctgtatgaggtttcctaccacctcatctagtgtcgccatcgtgttcgtggctagtgtcattcttgaaagacgattcttataacggagaaaaaggcatagcagctcaccaagggaaatactggacgactcttcggtcctgctttaggagggcgatacgatatattcaatgagcgtcccattcgaccggcggttgcgaaatactgcgctggagatgtcacgttgttaccagatctcttcaagttatatgacgcgaagctacatcgacctggagagggattctgggagcttcatatgccgtaagcaacccaagagcggatccggctttcacaaaatccagagtttgataattattcgaaatcaaatgctcgcgggccttgggatcgagagtctattgaagaagcgactaaccaatggaatgacgatgttttggataatgcattgaattgcgatgatgatgacgatgatttctttggatctgaagaatatgatgagtctggttgggtggataacggtctgaccagctgcagggacattatcaataaccgtgactacgaagactactattcagattagggtataaacaggctcagttcagttacaataggatatagtacccgtctgttgatttccatccgcttgaacttacagtactgaatctgaaaatgaatactttcttcaagaatgtactgtaatttatgtaaagaaaccacgactttgtccgagagcggttgattatatttaatcattggattatcagctgaaagattttctttcagaacccgatcacaacattgtcgagaagccaccgaccccaagaattctcacttccatcaccgggtcacgggctgagtgaattcagcctcatggatttatgccacgtcagacctgcatgtagggctcgaaattcacttaccataatatacgtcccccaccttatcgcgcaaccgtcgtatagatctcagctggattgtgttagaacatcattaggtggacttggtctatataagacaattggtgccttagcatctgcactcagccacaataacagtcaaaataggtgacctatacaccctaacggtagcatctaaaggtcgacaatgtcacgtctgtctagtgttcagtaggttgcccatcgccctgaaccccgtcagctaaataatattagaatatcattcggttataccgttcccctaaaacactcagcattttggtatacgcacatatatattaattacctatatataccatatatcgcatttcctataggtgttctggggtaggcggcttacttaccgaatacaatgactgttaactagtgagttatgtgtcagaatctaggatgaatactgtcatttttcatccctgatacagttgggtcacgtgactgaccaggttggttttccgcccgaaaaacatcctttcattttgttttatttgtttgattactaagttgtctatcagattatcatgttttctggactattgtcatttttagagagttagagaattgattgagatttttctgcaacatatacattcgccttaccaccgtttttccgtcaagattaatagtaaaaataccttactggtaggacgtatataggacgtagatagtaagaaaggggctgtaataggcgaaacattcggcgagtaacagttagggcaataaaggcgactttatagacacacacacagcgatgtcagtcacgtagagggagctagacccaaagaggtatactaaaccgaaattggtaattcgccgtcaccgcagagtacggagtacaatctaggttattatgagtctcatcacgtgcgtcttattgtatagcgctgcatcgctacatcgacaagtcagttaccttttgccgatatacctttaccttacaatgtaaatcatgggtatatattaagctaaacatctccgcggcattcccgaaatctcaatataattataatacaaatagtaattcccttcaacatgtagtctgcgtaaagataaattttaaggtcatatatatttatgatactcgctgggtaaattccttgtcgactctctaatctctgttaggggaatctcatccccatcagaatgatcaccagcgctcggacccaacacattggtgtacgtcttcccttgatcatagtccggcctgaacgaggtatccattcctggctgttcccccggggagttaggatcatctggtaagtggtagaaagaatgtcgtttcggatgcttgttgtgctgcatgatggtggaagtggattccgcggttcctgaaggctgagtggcagcatccgtggttttggcatttgttctgtttgtacttctgaagatagccatcatggtgccgctgatacccagcatgcgtgctatgaaacggagagcagggcgaatggttgggaggttggccgagacgatgccggcggacatttcgatcgcggtccagccaactgttcgggcgagagtgtaggaggaatcagccgaactgtagctaaagagtactgagaaacggtaggcggaggcgaagacgacgctgttgaagttagattggttagaaaatgatattccagtttggaaatgtgttagtggcttacaagaatcccaagctgaaggcaactagcacggctaccttttcagaaagtcgaagttggagcttccaaacttgtggaattggaaggaatagaatggcaacatcagttgcgatcgttgagacggcgttggcgacccatgtagcaacttggtcgatgcaccggcctgggagctgcggataccatagtttctggacagggacgcagataaagatgaagagaaaggttatacagataacccaaaggatgataaaaagcccaatgacatatgcccatgtcttgaagtaagggaagcggaagatccgatagtacatgagcagaatgctcaatttggtccataccaggttgtacacgtagagaacttcggccacaacaagaaactttgcaatcataatcacgttttccactggaatagtgtccgcatggagccccattcccttatggatcatggcgtagatgaatccgacaacgatgaagttccatagcttatgtttgatcagaaaccatgcggttgggaatcactagcgtgcgagagtcgaactaaccatagaaaatatgaccatatagtcatcccaccacagcttttgcatccgctcataccgggcgagtagtcgaagacaaaccgtcacgaaggccagcaccgtgacagaggccgtagttgctacagaccatggctgcagactgtcctggttgctttccatgacggccggttcagggaggtagacatcgaacaattcagcgaatgttgggcaatagaaccttatgtatggagtacggagtacgcggctgagtttctgcacggaaaggctccatatttgtgtcgaatacacgcctcgtaatattccataaattccacttttgaacgtttaactagagtctgaacttagttttgtggttggcccacagcgggttaggcctctgatatcaccatgctgtaatacataatgttgtatgtatcattaatatgtatcataacatgtaaaatagactgtaggaattaagtaaataacggcttgcagatccaaagtaaaaagatccacgtggatgcagggggtttgaattcattttacgaaggttttggcaatatgaacaaggcccactctattaaacaaggaaagttacggaggagacagtgacaggacgagaaaaaccccaaaaaaagaaagctcccaaaatggtgaatgctagtcttaaaatattgatttttaggactattaaccgggtccttcagtggcgtttgttagctttccatatcctcgattctatacaaagtactccgtacaatggcagtatatgtactagtggttgtactttgttaccatctctagaagagcctcatccacctcctttgggttggtggcattcaagtaatgcgcacccccttcaatcaacacaagtttagcctccacggacgaggtgaaccgtttaatgtgttctgcaggaacggtcgtcccaaagggagtgtcctcagttcccttatggaggcgttaatgtgcaaatcatctacaatcagtgaacataggactcacctgtagccaataaacaggacatttgatgtctcggatccgaagcagaagtccatccctctccaataggcaattgagcgccattcgaaccttctttcgaccctcatcacccttatacacctccttcaaggtctgggtccagaacgcggatttggtttcggtggcagcggaaccaaagccgattccccccaccaatccgcaccagacgtcatccacaacaaagtcgggtgtagccgagggagtggaccacttctcataaaacaccgtgaggttggcagcgggatcccaacagcccttggagcgagaatccgaggattcataatccatggaggttccgaggggcatgagaccgagaatctggcaataagttaataccattggcttggcttgtcttgaggcttaatcagcagtccatttaaccccagggcttagacctaccctctccggggctaggagggccatcctagtcacaatccatcctccctgacttgtccccaggacgaaggctttctggattccaaagtggtccataacctgcagggccatttgagccgaatcccagtacgtgaagtgttccgagggagaactggtcgagccatggcctaatggctcgatggccagaagattcatggcatcggtcaaaacttgattgttgaattgatcatcgtagagagacacggtcatgcacatcgaattcataagcacacatgtcggcttagaaggatcatagtgattcttagagaaggcatatccagccttgatgccaccaaggtgtgggactttgacggtttgaggggcagccatttcgtaatatccagcggtcttgagatgaatgtgaataatctatgttgtgcaataatatacttttagaaggggggggggaagcaagtcattatgccgattaagggggttcaggcaagtgagcccctctatcttggtttttttttcttttttttttcttttacgtctttagaatgtactccgtgctccatcctccgtatggagcatgtcaagcccgagagttgggcaacgctctcggcatttcggcctaaattagtgattgatcttcaattgacagtcctgtggagtcactttcgacagaccgggttgtcgggatttgccagacttctgcacccaaagtataactccgtactaaagctgctcggcagtggggccggatggtttttgagatattactagcacattcaccctctaaaagccaattcaccatccgcgtattgaggtattttggaacataccgttagcggtttcagatacgaaattggagttgtgcatgtcatgcaaccacaagcgcggagatacgtctgacatcgtagccaacagatctgaactggcttcgagactagtccacgggtgggtacacacaggagatcatctgatagagcatccgcttatcccttgctttgggcgtgaaggatctgttggagacgtttagcaggccactctatgtactccgtattcatgattatattaaccgcttgtttaggcaggacggcttttcgggttccacaaatcttcatttccagaaacggactatattggcaatagagttcgcctctccaggtgtattgtcatatggttgtaacgcaaaggttacaaccactaatttagagtgtctggatatcggtgaaatgccgaaagcaacccgttaggatgtgtctaatatatatatctagaacctgtacggactactccgccaatatagtaggagttaatataaatagactatttaattaagtgaaccttttcttagacgtggagataatttaatagttaaacatgagagtgagagactgtgacaatataaggattatacttaatacaggctcagcacttaatcctgacctttagtttctcaatacactttctaccagacatggatcggtaaacgcatcggtaaacgcatcggtaaacgcatcggtaaacgcattggtcaacgcattggtaaatagggtatgtatgacttgcctcggaagaattgtttcgtgcagaccatggcggagctacttagtcacggatggataagtaccagattacctaagcaggaattttcaatagcaaacaagacaaacaccttcatcattgcatcccagcttaacagaagctgaaagccttttgtccatcattgccagccataatggtagcagcaaaggcccgtgctcctccaaggacgcccgcaacaccaatacagcccgtggagacgtcgcggtaccttccagacaagacctttgttatcgacaatggcgcgtacatgatcaaagccggctacgcttctcatgcttcggcctccgacgaaagcgtttccgcctgctcgtcgatacctaatgctctcgtcagaacccgcgataacaagattgtcatcggtgcccagctagcgacagtcaacgactggaatgaggcgatgtttcggcgcccggtggagaagggatatgttgtgaactgggaagctgagagagagatctgggaccagtctttctttgatgggaaggtgacggctcggaatcggaatcatcatatcgcggacccggaagatactacacttgtgcttactgaggcgccgaacgccttgcccattttacaacggcacgccgatgagatggttatggaggaatggggatttggaggatatgcgagatgtttgggtacggtagtctcatatttggtgatatgatcccgtactgacttgaaatcctaggtcccaccctcaacgcatggaacgaaatccattctctcttcggcgatccgctctccaatacatccgacgcatctatcttgcccgcagattgcttactggtcgtcgattctggctactcgcataccacagtgaccccggtttacaaaggccaagcgcttcaacgcggaatccgaagactcgatcttggaggcaagcaccttacaaactacctgaaggagattgtgtccatgagacaatacaacatggtggatgaatcatatatcatgaatgaagtcaaagaggcggtttgctatgtcagcaatgacttttctggtgacttggagcaagcatggaagagtcgccgaaagcgccagagtgggcccgaagagggaatcgtgttggactatgtacttccagacccgaatgcgaacaagaagggcttcattcgaccgcatgatcctcttctgcatgctaaaaagaagaaaggagcggtttccgggctcagcgcggaagtgttgtcggaggatgtactggtgctgggtaatgagcgctttactgtcccggagcttctattcacccccggggatattggtatgaagtcagccggcatacccgatatgattcttcaaagtttgtcggttctgcctactggcctgcactctgctttcttggcgaatgttctcgttgtcggaggaaatgctttgattccgggatttatggaaagactgtgggtcctccaaagttaattggttgaagtttttactaacgaactatctttttatagagaaaccgaattgcgacagatcgcctctgctgaatgtgtcgtgagagtacgccgggctaaggagtgagtggtcatccatctggcttgatcttggaagtactaacatcaatagccctgttcactcgacatggctaggaggcactcgccttgctgcaaatagggaggaactcagcaaagtatccatcactcgccaagaatatcaagaatacgggtcaggatgggctgttcgacgatttgctggccttgtataaggtcctagtggcctgaacagtctttattatgcacgggagttctttttaacaatggcggaaatcggcagcattcatagcatttagtgataccctagttttcagtgtcagtggtcaatgtacacaatcttttggaacgaatataaaaatagttcaaggctagaacaccgtactccgcacattacgatgtgattattcgctctaatgttggaataaaccgtgttcttgcctgcttgggaaatccccagatccatggatccacgtctggtccctgttcatctctacttttagggctattatattaagcacttcgaagtcatctccatcattgttttgcgagtcaacggaataaaagagatcattaagaagagttggtctcgccgaagccctcttgatacactggctacaagaccgcaacccctaggatgtagctgtcaccccataattaaccatgggctcttcaggaataagaaagaatatagcgtttaccaatccatggctaaaaatcccgtacctgaaagatgagatgcaccctgcacttctacataagaggatgtctttcccatattcttagatctggccatgcaatttatccccttttgaagggcccagcatcgatcctccaagttgataccgaatccacggcaatatggccaagagccgctcgtccatccgaaaactcctagactacttggagcgagtatttgcatccaagaaagttagcgaggaagtaggcctgtcagtaaagcacaaagccaatcaaaagcgaatcgaaaagcaatacattaactctcttcatagatgcacagggtgctttcaaagggtcccaacgaccaatttatttactgctccttgtcagcaccaatactgcccctcatgcctccgtcgaatgtcctcgacagccttgaacagcccgggtatgttcccggcaaaatgttgtttccaagagattcccacaacagcacttgaggcagtgatgagcccacgaaacataaagcgctataccgttcgatgggaagagaatagcatccctccgctagagcgcttgtactgtcctcgggcgacgtgtggccgatggattcccccaaagagtcccggggcacggttaggatattgtgtctgtcctcattgccgggcaaaagtttgctacaagtgtgggaactttttccatctcgcctggtcgtgtagccatgactctgagacgaaggcgaccttgcgactggcaaaggagaataaatggcagagatgctctaattgcctgtatttcgttgagaaggtggatggatgtaaccacatcatttgcaggtgtgggcatcaattttggtatgttcatgcatgcaagtcctaggcaaaaaataacactaatcgttaataagttacctttgtggccaacgcggccgatgcgcatgtcctgcacgcggtggcggatatgaagacctggacacagatggaggggatattgattttaatacgctggtcgctgcaatggagcaagcggaatcgacagatgaacctcattggtgggacgatgaggcttagagaaaggacgaggagaagtaatcaatatttatttcccagcaaatcgcaatctagaataatacaatgcagggaagatatcttgatcgaaatgctttcttcccatacgctcagcaactagtagtcgtagaaacccttgccgctcttcttgccaagccagccagcatccaccatgcgacgcaggagaccagcaggtctgtacttgctgtcaccagtctcctggtgaagaacgttcatgattgcaaggcatgtgtcgaggccaatgaaatcagccaggacaagggggcccatgggcacgttggtgccagtcttcatgatactgtcaatatcttcacgactacccacaccagtctccagacaaatcacggcctcgttaagataaggcatcaagatacggttggcgatgaagccgggtgtatcggccgacacagaggccaccttacccatccgctggacaaaggcaatggcagtatccgtggtctcctgggaggtctggagtcctcggataatctccacacccttctggatgggaacagggttcatgaagtgggttgagataacccgggacgaagcctgaaggtcagtaggatccgtgttggtggcagaggcgatcttggtgatggagatggaggaggtgtttgttgcaaggatggcatgcttcggcgcgatctgggccaagctggcaaagatttttgacttcagatccgggatctcaggcacagcctcaatgacaaagtcgacaccggagagaccttccagcgtcaaactcgtagtaataagcccgcggacttcatcagcttgctcttgagtgaggcgctgctttgctacattcttttcgagaagtttatctttcatccaatgccatgtcagataattccaggcgattgcagtaaataaactagaagcgtaccggcaaacttaaggcccttatccaaagaggcctgcgaggtatcaacgagagttaccgggacctttgcattctgtgcagcgacaagtgcaattcctaagccctgaaaagtgttagacctgcagcgtagctgtatattctatgttacacaccatttggcccgcaccgacaacgcccagtgagttgacctcggctgcgcggactgcagaggttgagcagaagttgcgggccaccgcagggcctctgcggagggaaacaaagcgaagagtagaggtaagcatggctgcagtgatttctggaactatgggaaaaagaacaaaaggagggaagaatataagtgcgcagaagtatactgctatgacttcacgtgctttcggaggtcattgtaaggccctcgacagtggccaccaagcgtatatttcaccgccttgatgattccatttgcaaataacgacttcttcgaatataccggcttcattttacgatcacattatagatccatggatatagagcagagtcgaggattaatgttgagtatcatggggctgcctgttatccatatcattcagaagaaaggccccgaaaagggaacaagcccaaagcttgagtactccaaaaatcaaaatcttggaagtgttttaaaaaagtctagtgagaaattatagctcttgcaatatccaggccaggttcttgagaatatatctgaggtcttgcaagttcaagggttacttacctcttactactcagatctatagatctgatattttgccagatattgatattgccgcagtggccgttgatatttggcgtaaacatcggttatcttcggcattttggcggcattcagtttctccgaggcgccgacgccgacgcgtcnnnnnnnnnnnnnnnnnnnnnnnnnnnnnnnnnnnnnnnnnnnnnnnnnnnnnnnnnnnnnnnnnnnnnnnnnnnnnnnnnnnnnnnnnnnnnnnnnnnnnnnnnnnnnnnnnnnnnnnnnnnnnnnnnnnnnnnnnnnnnnnnnnnnnnnnnnnnnnnnnnnnnnnnnnnnnnnnnnnnnnnnnnnnnnnnnnnnnnnnnnnnnncgacgccgacgcgtcggcgcgttcccattcaacccgattcgggaagcaaattaatggggtctcaaaccagcccaccatggatgaagaggttgttcctctaggacacgacgtgcaagtcgtggacccagacgtgcgcaactatgtttacggcctggttactgctgtgagtacacttctattttctccttgccctggctctgggtcaattcgctaatacgcttggttatccagctcggaggattcaatggcgaagatgctgaccaatacgtactcggagacgatgcgctggcatgtctacgcgatatcaaacgctggttgaaattgtacgatgaaaagaataaccggatggatgttgcgcggtgccttggagaggccaacttgatcaatggtgatctgcttccaatcctctcgctctggtggactagtgggcagaacagcaagcatatgaccaggattgcactggcgtgcttggaacttcttgtgcccttaacatggcccgtggagattcatagccagatgacagtcaaccaccatcgtcataccccctacatccaacagacacaggtgcaatacaagcgaggtatcctgaggtccggaggattgaatattcttcgcgcagtcattcgaatttctcttccaagcatggccacccctcgatccgaacgtggaacccgagacgaaggaattctcaagttgatgttgtacttgctgcggaatattgcgatcatatccccgaataccagacttgcggcagaaggtgacgaggaggagacatccagatcggcaacaatcaacgccttccatgagcaagatgcatttgccctccttttgactatgtgctctaatgtcggcgaagacttcaaccttcaagatattcctctgatggagacaattttccatattgtcaagggtgtcaacgtcgagaaattattcatggacgatgagcagcgaaaggccaaggggactgacgaactcggcgatctactgagaaaagaatcattggtacggagggaatacgcaaagaatgcacccacacgccatggaagattcggtacaatgatctgggtcaaacgagacgatgagaagatgtctactgtctctggacaaagtgtattgcgcgacgaccagactacactacaaaagatggacgagagtaaaaagtggaataagcctcggcctcgtcgcagacaggaagatgtggaccaaaatagtaacttcaacatgccagctcaccttagttccgaggcaactaagaacctgaggactttcgtggaggagttcctggattctggattcaatcctctattcacccatgtgcgaaaagcaatcgagcgtgaagctgagcgtgtcgtaccgataaatcatcgccaattcttctacctagtgggttggttccttgaagcggagcgcatacggcgggctcgacagctccgtcatcgcacagctcagaatggaggaagaaccaaagatattgaacccgatagctatggtctggtagctggcgtcctgaaccaagagacgttcatttctttgaaccgtgctatgcagaatagcctagacaacaaggaatgggaagatatcaatgcccagatgcgctgcttcacccagattctgctgactgtccaggaaatggcagtgtcaccgctcgaagaagaccaggaaattgcggagaatattcaaaaccgtattttctacgaagaaacaacccatgaccggatccttactattgtgcgcggatacaaagatcaaggctttggctatttagatgcctgcacggagttagcacatgtattcctgcgaatgctggaacggtattccaaagacaacgccgacatgcaaatccgctcgcggcgaaaggccaaacagaagcaaaagaaggccgcccaagtcgccgaaaaagagggagaagatgatgatgaggagcgtgattctgaagatgaagacatggaggaagccgcccaggtcaccaaggaacgcagctttgactttaagcgattctcagccaaattttgcaaccaaaactgtgtggataccttcatttcattcacaggattctaccgggagctcaaccctgagcagctcaaacgcgcccaccgatatttctaccgtattgcattcaagcaggagatgactgtcttgctatttcgtgtggatatcatcggccttttctatcgaatgattaaaggcccaggccccatggactcaaacgagcctatctttaaggaatgggaggaattggtccggcaaatcattcgacgactagtcaaaaagcttgaacagcgccctgccttggtcactgaattgctgtttagcaagatcaactccactatctactaccttgaatatggacacgaaaagcaaacgatttccacatataagcgtcccccgccggagctcatgattacatcgacggaggcgacgacaagggaagcgaaactgcacatcgtggttagtgctctggttctcgatggtagagcagatctggctacctggatcaaggatgtcttgagctctgcagcctccgaaagagaggactgggagattcaagaagaagtaaatcgcgctgagaactccgagactaccggcgttcccaatccgatgattcgtatgttctcctaacaccctatttcgcgactggtactaacaacaaaacagctgtcaaaggcaagaacgagtttgttcagaatgccatgttctcgaacgcaaagctacgtctgctcatgaccgtcgtcggattcgagcgactcggcgttgaagatgtgcttggtgcctcttgggtcgtcccggcgtctctcaagtccgacgacttgcgtgaaacagtttctgaaatcttgaaagcccttcaaaacccgttctccggggatgccaatgatgatcctcgcaagcagatccaaccaaagcacagaggaagcggtcgcggcagcactactcaaggcacgcttgatgttaacttcggatcagagtccgaaggtgaggatattccagatggtcctttattcccagcgaatctgcggtcaaagtctagtgcgctggatgacctcaaaaagaagcgtaagaagaagcaaaaagccaccaccgaaacggagccactggatgaagaaactctagaggcgcggcgcgatgcgcgtctatcaaacgcactgtctcgccaagcgaagatcaagagtgatctgttcatccatgccagcgacgaagaaagcgatgcagaagccgacaaagagttcttccgacttgaagaagagcggagaattcaacaagcaaaagaaatcaagaaggcgttgctcactggacccgtcgagcctccaagaaagggcagagggaagaagtctgccgcccgcaagcgaactagcgacactggcacttctgcagccgcaaaatccaaacgacaacgtcgtgattctagttctgctgctagcgaggctgggagtgatgccgatggcgatatcctcatggcagaactcgacgttcaatcatctcactcccagcaaggaatctctactagtcatggcgccggagaggacgaagatacccgtcccacgccaagtgatgatgatcttgcttttgatgatgatttcgccttcactcgagatcatcctagcaaaccccaagctacggagcccgattctgtagacgatgacgtggaagatgagcctgtggttctggcccggagacgtatgcgcggtggatttgtgattgagagtgactccgaatagtgagctcactttgatatttgtgagaagtttcgattatgatgacctgatgaggcgtttggcattgtgatggaaacggaattgtaaagcatcggatacctaagctcaacgagaacaattacgatttcatatttcaggttatcgttctatccagcatagacaaactgacaccctacaaccatgccgagccccagggaatgcgccagtcctgcaagcgagggttggcatcttgggcattgtggaggatgagaatttgtttgtcctgttcgtcggatatctgtgcaagttccacacatcttctgtcgtttaaatacttgaattgttctaagggggcatgtctgtgagtcaaaagcgaaaagtgggggacttgcaactataaaaaccacccgacgtccccgacatccccgatatccacgacatataccaatatcccaaatcccaacatgactcatcttacattcgtcaccctcgatgtcttcacatcgacaccctacttcggcaacccgctagcagttgtcttcctcccagaagacgactcaaacgctctgacgcagagccagaaacaaacaatcgcacgggaattcaatctgtcggagagtatctttgtgcacccagtacgcgaaaaaagcaagcgcaccatcgatatcttcaccgcagactgcgaaattcccttcgcaggccatcctaccattggcgcggcctcctggttcctgagtcactcaactgaccccgctgacggcgatggcgtcaccaccctcgcgaccaagtcgggcgacatccccatctccgtccagaacgacgtgaccaaatatgtcgctgcgcggattgcgcacaacacacgcatccatgctacgcggttcagcttgaaggaattggtgaggctgcaccctacgctagcgccgttcttcacgcggccagacgttactttcccgctcttttccattgtcaatgggatgagtcagttgttcattgagcttccttcgcttgaggcactggctgctgtgacgcccgcgaccggcggtgagctggtctctactgattatcttgacgaagggtggaaggctgggttaatctgcgtgtacttcattgttcgggatgttgaagatagtgttacgaagaagaaggttattcggtctaggacgatactgggaaacctggaagacgcggctactggcagtgcggctagtggattggcggcgtacttgacacttacggagggtaaggggggtcagaattatcagtatcacgttgtgcagggtgttgaaatgggacgccgcagtgatattggtgttgaggctacgttgtctggcgacaaggagattgaacaggttgtgctgacgggcactgctgttagcgtgtccgagggaaaagtgctgattcctcatgcctaaataacaaccctagagctttaatgagtcataatgcaatacttttgtatagtcttctctggcgcaacggcatctcccaaggtcaaggctgcctatgattaaattcattgctgcctgtcgagagaaatagctagattccatagtcctggaggtacctagtgaagaggaaaggcacgatgggtagtctggcagagcaaccaacaacaccaaccttccaagtaggccaactagcaagtataggagatcatggaacctcaatcattcaaccttcctagtagaaatatccttgtaaaatgctaagtcctttcgatttgatatgatgagccaaaatacctttctgcctgaacaacagggcaactacacgatcctgataccccactacccaaggtagtagtactaccctcaagttcccctcacgacttcggatatgcaatccaccttcacctaccttgtgtacttcctatccttctgggccaccatggttgaagctcttactcggtatcagaccacgcccccgagcgacgccattgtcgtccatgacagacaatccctcaacgatctagtcaagattcactcggatacagttctctacgccgagaatggagggtattacctcaagaacatggaagaagaggttgttgccatcactgccgacgacctgtgcaaggagctggacgctgtttttgccagtatcgatgccgaagttggctctgggtctgaagatggagaatctggatctctcggtggggcaaatgttacgaaggggaactctgtctgagctacacagattgtcacagcacatggcacacggcacactgtatctagagtgtgctgatgcgcttgatggtgttggaaaggctccacaaaggccccgggagatttggctggggcagtgaggctggggcagtgaggctggaaaagaaattcagaaaagtgggcacgtctgagaaaactagctacgggcctttgggttgcaccagaagctattgaccactaaagaggctaagcccattgaatttattgcatccatagatagtgaattcaaggctgacgctagcataccttgtccccagagagacctaaaatgggattgctgtatcatccgtcaagcatgcttcttcggtaaaattgcccaagaagacatgtttccaacgaaaggtcctcagcctgaccgatggagcaagccctcacatacaaatcaaccggatttccggcaggctcttgactttcgctattgcaatctgttagaaagaagcccttgccaaaatatcatcttaattgatttcaaggtcccctttggcccccctcttcttgccagcccagccatcgtatctgtctcagcgtgcacgtgaatggaggcgcagcggtggtaaccctcatgctgccaattggggacttggctttattcgtggttcacggagtacgaacacggagtctccccccggtccaaaaaaacaaaatggaacacttcagatgaatgttgcaaccacccaaacattacaaatgaatcattctgcagaaggcggtgtttgttctcattctaaatgtccggtgtgctgcgccacagcctaggcagggtcagttctatttcgggttaccacaaggctgagtgcttgccgtggcgtagcgtttggacttcaggggactgcaactatgtaactaattatgattctacataggtagccggccttgcaagtctaaacggttcaattatctacattttattcctaaatttgcgcattaatggcgaaatcctctaaacttcatcggtatacacgacgccgagaattacatgcccgacaggcaagatcaaaggcacatcatgtacaggagacacatttcaccgaacctttggaacacgaacagtccccccttttcaagaggtatatcctcttgtacctatcactctactcctaacattgtaaccctaggttcttctcccttccacaagagatcaggaatatcatttacaggaaacttctcgtgcagcgatgcaaatttgatttggaacactattacccatgcaaactgcctattttttatggcagaccgggcccagatccacatcgccgggttatcgacagcttcgaaggcccccaatgtgcagcctgctgtagctacacctggaatcgggcacaagtcccgatatcgaaatcaccagcacgaagccagtgggcaaagccatataaaaatccatatctttgcgacaattgctatgggacttgaacgaaagtgttgacgggattccgtgcttgtagtttttaccatgcctatgcggaagacatgagaatctagccattctgctcgccagcaagcgattctggaacgatgctgcaccgatcctctggaaggagaactggttcgccttcgaggatcctcccctcctaacgggattcctgactgctatccgcccgcaagtgagatcgtggctaaaacggatatcgtttatgcctcttcatccttatctgactagcggtatccccagtagtacagatacatgggtgccgggttcgatctggaatgggcgggatgatattgaaaactgctggggtctgctgagactatgcgaggggctgacagagctggagcttgatgtagtgtttttgacacgcaaggaatgggctcaggctattcgactaatttctgtcaagaaacaagttacctttctccgccagatgaactcggaggatgttgactatgtgactgaagattcatggaaccttatatggaagtcgcacgttcggtggaaacgattcgactcgcccacgactgctttactcgcttctagcatgactggtgacagggctattaaaagaaaagttctgctgaattattactctgggagcaccccacatcaaagatgtggtgattacggggtcaagtttactgaggacatgaacaagggtcgaagacgggtttcatgattgtcaaggacggcgtttcccgccaatcatcaacttcaaagcttcttctcctcaaccaattgcctcaacactttgattgttccctcaactgctgcctggctcatcttcttctccttctcgagtagctccgccagctccacctccgagacacctgggtgtctccattcgaagatatacgtcatgtacagctctccaccagctccttgactaatcacattgctgatcttgcttccatttggctgatcaaagtctacccgggcaggctcgaaagctgtaacggtctctagaaccttcttctgggtttcgcggaagaggacttcgcgaacggtgacggcgttcccagttaatgagtcgatggattcactgacgaccctggtggattgaattgctcccggaacgaatgtttctgcggagcggatcttgaggaggaggcccttccaggtttgttcgggggtgataacgggtcttgcgcctggtgggttgatcggggcggtgaaggcgacgttgttggttgagctcattttgggaggataggaaaggaaattctcagtaatttagatcaatgctttgaggaattctgatcaccaattttgtccgatcttaaggcttttgactattcgatgttcgatctagggtgcgaagagcgatgacgaagccgggcgataacgctgataaggttaataagctcggcgttacggtggcccggagaccgatgatctctaagacttctgccttgtatatcaggcctcaatgttacccgatcgggacaagcagggtttggattcgggccatggaaaggaggacttgagaatgctcgacacaacgaaaattgagggggttttgaaatatgatgcccctccaagcaggttgcttatattcaaggctaatctgtatcttcctctggaatggtctgatgatccaattcgaaaagcaaaccctcgatcctcaagtacatagcgcagtgctttgcatatcagttcattcgcacgctccaagatattggatactattgaaattgaaatttcgatggattcatctttttgtcccataactaaacattcaatcaatgaactcggtcataacgaacgtggaatctctgaatgcaagagattcctatactaccgctaaatcaatcgaagaatccatgacccttggaaggcgtttctaaacttgggctaggaagttttactcgtaagcaatgatggatggcagaatacatcctgggttatgaaggtcaccagaacagcgaaggataccatggaagaaagggtcattccgctggtcactgacagatgagggatggatgctcaaacaaaccagttccccgataattccgaatttgtctgtaagcaaagtggcgactacatactatacgtacatgtatggatattccggaaaatgaaggccgagaaataaggttgttttagtgtgggggggggcgcatcccgcattttgtcctatctttagttcgcctatcatcagccacgaattgaaaacacataacagcaacataacagcaacataacatggaatccctgagttccggtctgatctacttggcagactcccgcatatcagaacctagatacctcaggcactcatatcatgtggatttaatctacaagggataacaagcttgtctgcacttgtccagaagaccgaggtctccggggagaaaatgaagtttccatgctcgatgatattaaatgccgaaggctatatcggggtgataagcgagacgcaaactggaattctagtcgtgattacgatattgtcatatgttcatcagatagaagatataagtttctgtacactccgatatgataatactacatgagttctagctttcaccagagacaacatacaccggagctgcacggaaaatgaccataatagccaactgtggcctgttcgaaagctactggtttttaatacatctaataatcaagaagctacgccccggtgtacgaatcaagacagcacggaatccgctttccacatcaagtcatggtggtcatcatatatcggcagagataataatgacataggaagcggaagcaaagaaccgatcaataaccagcgttcaatttgaaactgctttatcaccacggaaaatacgatccgggaattgttcaatacatccctgagctcaggctataagtgtctcgctgtagaccctccgatgaagcaatagagccagagaccttccaatcgattatatttctcatcacatcccttgaaaaccaaacaaatccaacagagaaccagcccgcaaatatggccgtcgcaatgcagtccgcccctatcagcctcgagacaatgtccgacaacatcgatgctgtcaatgtccacaagacagacctcaaacaagacaaaggactttacgatgaatccgaattcgacaagtccaaagacaaggctggcttccgtcagttcgaggatgcctgtgaccaagtcaaaaacttctatgcccagcaacacacccttcagacggtagcatacaacctgaaagcacgcaacgacttcaaaaccaagactcgtgcacacatgactgtttgggaggcgatggagaagctgaatacattcatcgatgaatgtgaccccgatacctccgagtcccagatgacccaccttttgcaatccgctgaagcaatccgcaaagagggaaagcctcgctggatgcagctggtcggactcatccacgaccttggcaagcttctctttttcttcggggccaagggtcagtgggatgttgttggcgatacctttgcagttggctgtgcgttcgacgacaagattatcttcggtaacaagtctttcaaggacaatgaagactataacaacgaggtctatagcaccaagtttggaatctattctcctggctgcggattggaaaacgtcatgctttgctggggccacgacgaatacctctaccatatcgtcaaagatcagtccacaattcccgaggagggcctggcaatgattcggtaccattcattctacccgtggcaccgggagaacgcataccatgagttgatgaatgaacatgatcataagatgctggaagctgtgagggctttcaacccttacgatctgtacagcaagagcgacgaagtcccagatcctgagaagctgaaggtaagcttgacccttggatatttggattctaccacgatgcatgctaactcggtactggacagccttactacatggagctcattgatgagtacttccccacgaagatcatcaggtggtagttgtgccgcactcttcctgtttttacaatcaaattgatactagctaaattaggatcagcccgttgtccctttaaacattccctgataattataaaacaagatgtaactccctattacgtatctcacatgcgagcggtgcacaagttgaacggcacagtccaaaacacatagtaagtgcgataaattacaacttgatatctcaacaacggtggtctattaattctgaaaataataacattgttgttggaataagcggccgactattcttgttctctatactttcaattctacagtatctatactagaactcattctatcgcccaccagattcattactgtaatatcgctaggacttgaatactgcgataaagtggagatatggagcatcgaattgtggaagcaaggagcaagaagtgatcgatcgatatgttagttgtggagagaactgccatagatccatatatataagctcatagggataacgaaaacgaaacaagagtcatacacgggcaaagagaggtctgaaaaactacctaatcaagtaacgacaaaacaaccaagcaggcaacggtacataaaaaatagaaaaggattctggcacgcattgtggcctgatttggatattgcctacatatttcagcgaccagctccttgatcattggcagcgagcatacccaggtaccatagcgctaacaagactgtcaattgtgattgcgcagcagttctaccactagtgaatggaatagtcgggacaagttcaaggttaccgtcgaaacataactagttctcggttagttataagaaatctatatcgagaatagtgctacttcttataccaattcacttaactaaatggttgacagtactccatgcgcacggtatgactgggatatgctgctatagcagtgttccatttccaagacagcttgatatctctaggagcgtggttccagcttatgccttccggaactccaagtgggtaaaatgaagtatcaggtgtgaaggaatttagaattattgcatactctccgacgtcgaactcttggaaaaatattgtcggatatcgtacttatcaaagcattctccgatatgatggtgaggtcggtagaggattcggtggaaggcgtgtctgtctaagaacgtttccatgtctttgcaaaatgatgttcaattcggactcgcgccagaccccaatgctgtggaattttctgcttcataggctgagtttgttgtgtcgagttgaatgaggtgtaggtatgcctacttggccctccatagctgagtagtgataatatgcaaatcaacattggaagccccgaaggccgggttatccccgagagacccttggctctttgttgtgaggtctcacagttgaaagttgtggacttgccgagccttcgcttcggtatttcagagatgcccgttcagacctgcgtcagctaaatgatgggaaaaccagatctaagcggcttatgaagaatttgtgacagagcgttcgattcggaagatcagctacaacctagtaaatcggggccaaggaagagcttgatcatcagttgcagtaaaaaacatatgcttcgtcgagtttcccctttgcatggtcgcaggcctggtgaatgtggttagacaacgtcatggcacatgccttcagagggaggagttctcacaaggcaatcgccaatgtcaacaacaatttgttcttcatttctgagaagctgctcctgttcactggtgatctgatgttcgtcgtaggtttctgctcgatcaaagtccatccacaccactctttcggcagtacctgtaacgaccatcatgttccttggtttgggatccctgtgccgcactagggccttatgtatttgttgaataccactgatgagattatccatccgttgctgcgtataattctctagagtgatcatttccagaccggtgatatactccaagaatatggcgctaggtgggtattcgtcgtccaggaacattttcaagtggggtaggcatgcagatggatcgaatttcctcatagaccctaggaaattgggcacgattccacggtcacatagacccctgtctttgagttgggtgtaggcagtggtttcaagcacatggatgtcgagttcacagttctctggttcgtaatattgccgtgggccccttccgtgatgcttcgcatgttagtatttcggtagtcaaagctacctatgctggcttgactcaccaccttcataacacatgtctggccgcggacagtgacaagaaatattacggaatatgaagaggcaaaaatcttcttctggaagcaaatctccgtgggatataggttgtcaagatttgacatgatttgatctagtcgtgcacagaggtgccaaaggaaacatgctctgagagataaggcaagtattggtgaaggaagaaaggagcgatggcaaagcaccggtcacgtataatactggtcacgtgtagtccgacctctgggcgcctgaaacagcggttgatgacctcaccgaagtgtatcgccccttgaaattcttctataaaaaatacggatacttgcgccataggggattgtatcagagactcccacatggttattcgggacccccttttggtttattcggactcctgctgtctgatctcttaggcttcaactgaccgcctaccataaaagttcaccgcttttctggccgcttttcgtacaatttactgtttatgtttgctaagcgagaaggttcgatgtttgcaatgtttgcaaagggtcaactatacgagggatctggatggcctgcggccgcccgatagtcgttgcagagcaaaacgactgattctaacttctaatgctacgtaaagtgtgatgtagaagctctggggaagataatgatggttctttctctagtctatttattctgccggttaggatattctgccaaagttagctgaccgcatagcttcttatgattttggagcccataggagaaaagacctggtcacgtgacatgcccgcgaggttatgatttaattgcttcgcttcgctccgcaataatcaggccgtttcccactttgtaacttacttcttctttctctccatcttggtatgcttctctatttacacgtgacctgacatctcacaataacttaagggcatgttttcaaaggtcgtcaatacatggctccgcatttcgtgagtcttagggctggaatctggggtcaatttccctggattttcctacagttaatcttgttacggtcgaccagtagcaaagccctttcatttgccgacctaagaggccaagacctaaacgcctgtggatctcagactaataaatttaaacaccaacttcagaaataaatgaccggactctgattattgcgctaggtaagctttagggttaaaggtatatgtggtggaaatcatctataagcctccttatatgtccgtcagctagcaataacctttcatctactcttcttcgaatttctgccacgatgtccttcccgcagcctactccgacggtaatctcgagggagcatgtggatgaagtgaaagaggctacctctctaaccccaatgggcaagggaaatggagatgacaacaatctgggtgatattgcccagatattaatggaccaggaggatattgaatacccggccgagggtgagtattcaccacttttgtagtctctatcgacctaatagattagaacatcgaaagctactgcgaaatattgattggcgaattgttcccctcgctgcttgggtctgcggtctacgatttgtggacaaggtacatatgaaagagcagttcctaccatcccatggattcttatgcgatattatagtctggtcttggccgacacgacatatggtcttcgcgatgatcttcaccttgttggccaagagtactcttggtgtgtttctgtatggctccccagcttggccctctcaagacaagaccactaatgaaggtggggacagatattctattttggatacctgacagggtctttcttctctggtcgcggcctgcaatatttccacgctggaaagtttatgggtgatgccttgctatgttgtattggggccacgaatttgctttaatattggtattgaggttcattcttgggtacaacatattcatttgttggcaataaaatctgtggctgataagaccttaggcttttcgaatcatgccttattcctggactattgcttgtgtatgtcttgaacaaatctggatgggtataagatataagctaatgcactgttcttcagcacaaccatgtggttagtgggatatctggcaatatactattcatgctaatgagatgaaggtatacacaagaagagcagcttctgcggtttggtttatggactatgacaaacggtgctcttccggtgcccttcttaatcatttactatggtctgtatgccaccagatctctcttttcaaaaaatctaactttgaactgcggggcttagtcatgtcacaacaggtcccatagttagtaggttcatctttgtctttatgctttgctatagctaacgtctgcagacatcctggcggctcattttcctcatcattggtctcttgagcagtttgacaggggtgcttatgatatgtgcagtctactatttccgatgtaaagcctaatttatctagtttgttttcatgcccgatgcgccacagtctgcaaaatggctaagtgggcgagaaagggctatagctgtcaagcgcgttgcccaggcctagcttggacttaaagatagcaagccacctaggaacctgtttgatatcatgtactaatcatcttctatagctcatttcaagtgggagcaggtgcagggaacattgagagacccgcatgcgtggttgttaatcttacagatgttgttctctcagactgctgggaatgtgacaacaaacttcctcgggattgtgatcaaggtaatacccaaacgagcaccttactcattcatcaccttactgataaattaggggtttgggtacactgcactgaaggcacaattatataccacccccaactatgccattcaggtaaagagccgcctcattccatcatctaaaagttaaacactaaaacgtactctagtgaacccaaatcctattatcctcttagtatattgtattccatgtcacgattgggattcgttccttcccttttcgttccttcccgattgggatggcgagtcagttgttccttcctgaacaagtaagcgagaatagggctttgatcgcaggggtataagatccccaccgtagctctgttagaaatttaatctttctctttgcattgacttgacccgtaatactctaactgtcttctctgagcatcctcgctggtaccgatctttctgcggcacacacctcatacaatatgaactatcgcctgtgtgattacaatcctaacacggctgctcccggatcatcgaatgggtgcggagcccacacggattatggaaccttttccagtatcttccaggatggcacgcccggactggagcttgaagaaacccctggcacatgggttctcgtccccggggatgccactgttgtcttgactggttggtgtgcggttatcctaagtggtagccgggtttccgccgccaaacatcgtgtccgccgttccccgggcgtgcgtcggttgagcgctgttttgttcgtcgcccccgaccttgacgtgaaattgaagcctctgggtgattctcagccgatccgatctttctccgagaccatcatgcgtggagacctagatgttgagaccttcaaggacgttatggggaagagatggcgataccgagagggaaacgaagagatggacaatgcggattccctctcccaggataacgagattgacaacatggtgtggggctaagcttgtgatgacgtccagcattgcctaaaggtagctctgggcatttcttccagatttcatggcactttcccgggttccaggccactatttctttgtcctttcatctccatgaagctatttagaaggcatggcagaatttcatcagcagtttatcccacttgtgttggtcaataatctttctatccagacacgtagacgagatgcgtgcatcagtatctttctcttctccacttttctggtgtattggctttaaatgagtgtatattcaacggaccgcgttccaagaggaagtattgggccatgaacttccaattatgagtataaagttcgatctactctagaagtgctgttccctgcgatttcgttatttatatatatcatagtatcgataatcggatcaatattctacatatagtgcatctcaacgttatttaggtatactggacctatagtgacactaaagtgctttaggatatcggacgccactcctatcattgctaagtggttttcggtggatttatcaaagcaacatcttgtccttcccagagcttaaatgaaaagtaaacttgtcttgggtgaaatgcgtaagggacaacattatatgctacgcggttatcctcttttctacagccaattttgagtataaaatgtatataataacaggtaaaatcgcttgtcattggttgtcattaaggaaagtggttggtatacacaatattcagaccataatccgagtcatcatatcacttcattcaagggagagcagcaggggcgtagctctgatcaggcttgacaaccacaccgccagcaagctgcttgtcggtataggcaggccagataatctggcgagcctcattgacaatggagagagtagtgaagccattctcctcgccgaactggccgctccagccggaggtgacggtatattcgccgcaggtggcggggccaccgttggccctggaggcaggggcaccctccacgatgtaggtgcagggagtggcatcaccggcgccggggtagatgccaaaagtccaggtgcaggaggtgtcttcggtgtcgcagacacgcttggtgtcctggagagtccactggggggtgtcggccatcatggacttggcagaggtgtcggcgggggcagcgaaggccgaggaggcaaagaggccggtagcgaggaggagctgagtgagctgcatgataatggttggaatgttgagtttttgattggattatttagtcttgatggatgttggtgagaatgaagaggccagacagtatgggagggatggagctatttaagtactttcctccatcatctaatatcaagtttcagctcattgcagatgactctgaaccctttcgtcaagctcgaaatagaactatagggatacatgaatgtaacgtcgagtcaggtaacacccgtggacccgaaatacgttgctccacaacagtagaagtgagacagccctgctagctatgatttgatttgtgcattcctctctatgaccttgtttgtttctcgacatggttgccaacataagttccgtttttatctaagacatcgtcaaaacccaacgaatcagatatttctacagctgcaggttcaccccgcaaatatggtcagaccagctgtcgatcaccagtcgatgactctgtgtcatattctcttatacgaagcaataatgaatgctgtatgatctgatttccgaaggtaactatgtattctggaccctgtaaccccggttacgccacgatttccacgccacccttaggaaccttggaatggcgttgcggaaaaatgatagaagtgggccaaggatattgttgattggtgagaacattgcctaagtggacatctttgatgaatagccgacataccgccttcccggtccgcattccatatccggacaatagaactgtatatagatacatttatacattaatagatcatgataactcaatgttgaggaaaagaacccagttaggctccgttctggatggttgggacctaaatccaacagttcacctgatgaccactttttttttgtctcgccacatatcagtcgccaagtctttcgtggccgcttacgggagattgcagacgatctttcaatttatcactcagtaggcgttggaaaatgaaaggatcgagtgatccggggccgcagtaaacaccgattcgctgatccttccccccactcattcgtattctgtattgtaggtaggctgtaggtaggccccttacgccaggagcttttcgcttgtccctcagacagagatctgcgtttaatggtgttgtgctggctacggagtactgcttgccttaaatgagctttgaggctgtgagggttcgcctttttcttgcttgtcagatcgcaagccttctccaagggttgatttcacatgacgtaccacgttaggcgagccatggtccattgccactgtctcttcccagacatcagtcaatccccacatcgaactaaattgtccgctgcagatcgaacaggtggtagagatcgttgctgggcgtggtggagccgggttttaccgtggcggtgacgtcggaatgtacagcgcaatttccaggctaggaaggcggtatattttctatttataaaccgaggaggcagtattctcaccactaggaactatgtatgtgtcctcgtccgatgaatatcctttagcctccgacctctatcaatagttaacacttcataccgcttatgtgcccttggcgaatatactgtcccatggtttaccaatatatgggctgagccgggggtcagcaatctcacaatgccatatctgtaatctcggtccaaggaacgccctccgacggatgttccaagcacaaacaaatttgcgtcgatccagggatcctcttaaataaattatatggtgacatggggtagtaggtgatccgttaacacgtcctgctgcaatgttcgccttggaaatgaacacgaagctcgttgcggtgggatagggctcgttggaatatagtgttacagtcgacctcggtttcattgaggcccttcaaatctaagtgcgccttgaacgtcctcagctggaaagtcccaaggcaggcagccacttctctactcagaagtatacatgaaatcagcccgtagagtgtacttgaaatctctaaacacatcatccccaccatggaataagtgtctttgaaagatgatgacagacaccgtctttggaaatatccgaacgaattccctcgagttcatctcagccgtaaacgacgttgcaccactcagaagagtatcagtcgtaacagaagaccccacaactgaagcacagctcctgtcaccaactggacccttctcagattcaacatcagcaagaccaatctgccacttctttgcaaataacattactcttcttcgcccacccaatatgaggctgcaactcctccatatcctattcctcatcccatctaaataaattgtgaatattataaagcgacttctccagctcatcaggcggaacaaagcactcatcccaatgaggccggaactaatccccaccctcataacgcaggaactgaagacgcgcattcagttgacagagacggagcatttctgccgttgtcactattgtggtcttgaaagccggaaatttaaaagggtttgtttgtgttatggctgggcttcttataccccgctttttgaggctctgcccgggaatactgcctgcagcttggtcgaaggattatggttagctcagctgtcctatcgtcattctatatagcaaagattttttggagcagttgctaacgatgaagtagttgatgtgataaaagtgacttgttttgttagtggtttatatacaaattgtaggtaactatctaccgtcttgctagggagttcgttcgacactgaggcggtgtggagggcggtaagatgggtagcgaaaaatcaggcagggtgtaagggccccgatgataacgttgtgtaagaccgtttaccaaaggtcaaagacacagatagtctgatgaatctgtaattcaaggcaactactgataatcaaataatttctatactgaattaccgttatcaaagatgcaaaggaaatgaagttagaagatccctaaaaataagattatgtaagtatgacatccgccacatgtggcacaagggattgtggctagagatttcttgattggttcacggcccatctcatctctcacatcctctcatcctccattatttggagccgacaaaatatcattatctctgatccgcctcaaagcacactcttttatttagcgctggacatttttatttctcgctatataacagcaacacaaagtgatctcatcgcccacaaaacaatcattgcgataacctcttgtctttcacattttgattatccacttcgaagctcaagtgcctattcaaaaatatctatatataactaatctcctgaagccgaaagttgcgtatttttgggttgagtttgactattggaacagtccctcgcaaaaagccatgtcaaccgccccgtccatggctgctaccaatcagaactccacccaagagccagcaaccagcaacagcgggacttcacagatggagtcagagatccagcttgtttcatcactagccaaactacaagaactcgaacgcaaggtaagtacacgagcccttacagctctgccacagagccaagttaatgagatatccagatccatgaactgcgtggattcatgccccagggcctactagagcctctagtgcctattgcaaacccagataaagtgtcactcggcaatccaatcgctgaaacgccacggatcctccgggctagtctagatgaaaccgcacgcgcacgcgttgctgatgtccagcaatttcagtccttgtggagggatccggaattggccttcgtctgggcccatgttgaatcacgcatcagggaagccaacggccagctcttgcagccaacagggaagtgggaaagagattacgacgttcttctagaagaactagcacgaaaagaaaagtcgaaagtagatgagcgtcagcgagaggacgaagaggctgaacgtatcaaggcgcagtctaccgagggcgagtggaagaatgtcttggagcggtttgttcagcgcgatattcccggtgtacgggttatcaagagccaggatgggacttctctagcggtagcacttgttagagctggtgttgtcttccagatcaaggggatatcttttcctggctccccagtctctgactgggaggtttcgagtaatatcgctggtcggtcacccacgaaacttgagaatgctatactggaatgtgtggggtcacgcccgcggaaatgggaccttgctttcttgctggtatgttctattcctgacaccgaaggagattcttgctaataccgatgcaggacatgatctcttcctatgcggatatcaagcagacgccatgcgtgaagtgcaatcgcctggctgataacggcgcccaactgccaactctccgtcgccctcgggcgaatgaacagtctttcaatgggccagcgcgtatatatacctttgacgcattacactctggatgcgcctgattgaacggttcatggggcctgaatggacgatgaatatctcttaacccattcttgggtcacagagggaatttttggaagaccatcggctcagtgggctatatccatctcatcttggtcttgacggagaaattgattggaagcattcgagcgatctatctggatttaacagaataccatgcaaaccaccctcccaatacccctgattcctttctccccttcctattcattggccttaatctgcatgcttcccatgaatattgtcatgccaaaattccgctggatactcagtcccattttgatcccagtatcgcctcggaatacaatgaacttcctccttcccggtccatcccccccttcgagcccttctcccattgcaatactcaacagcactccacgtcccatggtccggggtatggtacttcctcgtgcggaaatcatagcggtcgcccgcgggccgccgtgcccaggggagcgggctgtagttcttgtcaggctcgttggggttgctctcccatcgggaccattcttgtcttgtgggctctgaccggggttgagaggatgactttctggtcttggctttgggttggccgattcggcccacgtagatgtctggccctttgcctgataggacatcaaagaagcgccagcggcgtggccagtgttgtgggttgccggggcgtggatctttaggccagatccaacctagttgggagggcattgtttgtttgtttttggctctggatacttatcggtgatagttgggagtgaatgttggatgtggaagacttaggacagatgaaataggtaggtattagtttcatggattggagaaagggcagaaggagattaaatagcctcctttattttctaagctttcatctcagtcaatgaaccgcttgaatgacttcctacagctttttttatctgtaagacactccaatttccaattgtatgaagtaagacatcaagctgttcgtttgtctttgcgcaatgattggaacaattgcatgggaggtgggactgaacgcctcagctcacaataaagggaatatcacggctgcgcgcatggcagattttatatttccggtaggcaaaaaaggatgatctagacgatcaccatagagtacatgtatgtatttattcttttgattggggctatagtatatacacccctgtgtagccaggtcattcggccatagatctataaatgaatcttacagacaacggctaagcaacacagcgactaagtaaatcttaaatattaaacattatgtcattcatgtttcagaactgtctcgatcttgactttttgatttcattgatctaaagccttaaacatcaatatcattgcatcaagtgactctccaccaaagaaagaaccctgacacaagtttctatcaagttaccgtgcaagttctccagcaaggccatggaaatcatgagccagtcacttcccgcaaaaacataatcttcaaggtggacgaagcagacaaggcccatccccactacactggctatctgcaacgcatagcctcccatggaggcgatgtccaccaaaaaagacaatctctacaagagggctctagatcatgacttcatggggtgaaatgtgttgatagtaccccagtgagagacttgctgtgcccggaacgggatttagatcgcagtgaaaccgagggagaactcagggtatctggaatcaaggatcgaaaatgcgatgcaacggatgttggattttgtgagaaaccgaaaatacaaaaaaatcaaatccccaattgaccatctccccttattattaacaaaaatagaaccaatagataagagaaaggatgagatgcagaaagtgtacaaagataaatataaaaaaaaatgacggaacgccgcttccttgctattatcgtaaattcagatcgcttcaacaatgcaacgccccaaaatggaaaaatatgttcatggtcagtcaattcgagtgcaccgagtgggtgcccttcaagtggtcaggacaccagcactgcccgcaaaccaggtgaacgaagcgaaggtgatcacggccatgccgacggtgaatttgatagcgagacgactggtttcggacagagcgccgctgcaggtggcgcacttgaattctagacaaaggttagcagtctgtttgagcgaggatggttggtataaaaaattcaccattgagtggggtgtaagactggggtgtgtacatcccgaagatgtaaccaccattctgcgagctcaagtatccggcactcgcggtgtcgctaattttcttgctggcatcgtagatgatcagagtatacgatgcggtaagcaacggaatagtagccgatgactgatattttccagtatcccacacaaggcttccggtttgctttacgctcatgttggagctgagcgtatatgtcatcgagttgagactgcacgaagccacgacgttgaccgcagacggcgtgaccgacaaagaagtatagttccatacaaatgtcacatcctggccaatcttgtagtaggtcgtggacgaagaagcgggagtgatcatggacacgccgccagcagcggcagctgggtcaatggagatggaggtggtagtggtagtcttggattttcccgtcttcgtgccagttgttgtgccggtcgtgtcagaatcggttgcagtgcctgttgtcttgcctgtttttgtgtctgtacttgtgtcgctgtttgtgtcggtgtttgtgccggtggtagttccggtggtggttccggtagaagtcttggagacagtggaggcatccgtggtagattcggaggtttcagcggtcgttgtctctgtggtatctgaattgcaggtcagcatcaagggcaatggtgtgataagagtcctgaattacctgctcgcttatccaaggagttacccgggagttctccatagggccgccatggccaagccgatgagatcgttcccagcaacaagatggtgcagaacacactcaaaataaaacaccgcatgtcgaagttttggagagattatctggaagttcaaaaatcaagcgaccgaggtattactccctgggctgaaaggtagactgatcacgccccttgcacaacccggtgtgaattgtcaaaaaaaaaaacacagaggcctcctatgtcgaaacaggcttatcgatttgatgtccgtaccaagcaatttcggttgctagggaaggacgatcaaaaggatgtgcagtgcagaatatgttattaatccccttgccagtctgggcactaaaacatgtagatctcgggagtgtggggtttcgactcggagcaacgatggtaaataatttcaaggcaaatagtaaacgactgtctttaccttcacagacaattggagagagggaagaaaacagagagaaagagaagatgcgatgtttgagctgtattgaggagctaagcccaaataggtagtggctgtccagcatgtgagacatgggctatttatagcggacaactgataactatctggactatgtatttggactatttggactatctagaataccaaattcattgtgctataaagctgagaagtgtcaagtctaagtttatactcgttcaggttgagcaacgcaaaagttcgactttatcagacacaagattgcttatatatctatcacattatgagcatgtaaatcatatgagcaccgatcatttattcttatcctttaattgatcaaatccatctcacactgaaacagaggggtctgcaatatatatgtttcaattcaggatatgtatgagtgataaccatgtacttcaacgaaaaccttcgaactgatattcaattaatcacctatcccagaagttgaccaacatccgactatcattccagggctacaaaacccagataagtgaatgatgaatggcagtgcaccatgacatagcatagttgcacaacacaacaaaccacagccctactctgtactatgaaccggaaccgatgtttgacgccagccatggagtaaactgtcatacctacataaaacagcgaccaactatactatactaaagggtatgatctacaatcgccacctggctgcccgtatccaaggtcgggtatcgctcggttccgccagagaagtttcctaaacgtgggggtggcgatgtagcaactcgcacccgaagactattacgaatttagggatgggatggggaagattgaaagatgtggggatctatgatattctctctcattgaaagactatatggcattggtgaggatccctatgtcgggagaagaattctacatattcgatatagagcattcacaggacatccatggatgttaagaagataacgagtagaataatcaagatattatcaattaagcctgccttatacgctgagatatgctgacatgaaaaaccaggacaagttccaaattttgaaaagaacacaaaaactagaaagcacatatcacaatctgatgttcgctacgagttgtaaaccaaaatccaaaagtctcaaaaccctctaagcagagctggtgggaatagcattgagctggatcctgtcacatccttccggaagtgcaggttcctgaacagtcttgctgaggaagtgcaagttggggaacaactggccggcctcgaaattggtggggcaccctgaaaaaaaaaggagtcagccattgcactcaacacgatcatgtagccttggaaaggggtataaaaatagaagaacttacacagccatccatcccaaatctcactgggtccctgaacgccctggcggctgatagagaagcctcccgagccggaagtgggtttgacgctgatctgggcgcgccccttgcgagtgcctatatagtaccaatatcgttagtgatctgggctcggtaacagtcacattcaaaggtaggacagggctaagcttaccttccacgctgatcaggtcaagagtccaaggggacttggcctcggtatccaagataatggtgccattgatgaaggagaaggcggcagcgttgctagccgaggcaccagagaagacggcttcgctgttaagcgggtcgctggccaacccgtggccgacggagaggtacaggtcgttgtgagagctgttgctggaaccggaagtcctgaggttgaagagcttttgggatggggcggcggccacagcggtggctaggagagcgacggtggcgaagaacttcattttagatgatgagtgaagaattgggttgggaatgctttcaagttaatggttccttgaggggtttcggttgtttttatatgtttctttcaagagaggggtaggattttgacggggaagtgacgcatttatatgctttgggatatccatgggagactgtcgatgaacatgctccacaggtggagtgtagggccatcggactgtttcgagtgtcgaacgctgatccggatcctccgtatagagtagatatccttgaaatcaaaatagaagccgtcatcggtaaagcaggtagaactgtcgattgattgttcttcgacctcctttgactctataccctggcaatgttgctcatttcttcttctctttgtttttcttcgcagcatgcaaacatcactgcggttgtagtattttccttgatccatgctgccgtatcagaacctgtgtgtatagggtaaacgaaaggactaacccaccggatactaattacaatcgacatgctggaggtcattaagtgggtacctgactagctacaccatctaagccagtcatgatggtgatcgaatgcagatctcacccactggtgtgtcttctatccatcaattgaggcacctgaaacaaaggttggtggtattaatgatgtgattttgcccctatgattgggtcacacaatgatatatgtaggcgtaggatgaattttgtttcacaaatgatttcactaaaagaaaacccatcaagaatcataccagaatccccttgccaccgaagtaatccataaaagaagtcgacaaacaacgaacgccaagatcccgtggagcctttcccctgaatcctgtctgacttgtttaatatcgggctgcgactctacttcgtacaaacgaaaatctcttgcctatttggctcgatatgccctcgcttctatgtttttcgcatcattgataatttgtggtcccactagaaatagaatatggtccactgaaagcagtgaagttgagggctgttacatagttttggaaatattattagaatacccaacccctttctctttggtaggttacgtgcttacgattgacatgttgtttgatacttggcgtacatcatggaaggtgtgtatgaacgcatgtggcttgagttaaacggcagcttgcccctatgcgtgtaggaaccccttagtagcgtcacactaggcgttttaagcatgcgcctagtgggtactgcctatgtcgtatgccgtgatgtacattttgactgtgtaactgtataactagggggtatggcattgtctcattgtcattcattatctcgtgaaactcactatcgtacagaaagatagcctgttcgatttctgcccggggacgatctcagcccaccggctttttttccaagcccctcatcgtccccgattgctggcgttccgggcaaattcaggctttagagtccaccgacctcgacgatcacgaccatgctcaagtgtcgcaaccttcttcaatgactcctggaactcagcaacacgctgcggattggagcagtaatgattgaaatggtgaacaatcgactgcgacagagttggcccacgctgagaggcaaggtagtcacggatcaagggcatgaactctttgccgcgtggcatacgtgctgatggactatcagaaccacttgttctctgtccagcagccgcggcagcagcaggattgagtctagccaacaggtctgaagatgatggtcctgccccagcagggcgagccgagctaccaccagtccgtggatcttcgcggcctcccatcccaaaacggcctgtccaggtaggaagtccgatggggagtgcccgggcagtttcttcggctttgcggagctcttcggcggcttcgttggcgacgcggcgagcttcggcttcgatcatcttagggtctgcgcgaaggactcgtttaccgtttacgatctggtcgtgctgaacggcagagtgaacgccagaacgagcgaaaataccatgcattatgcgatcttcggaagttttggcattattgtcctcttcggcggcgttctggaactcttcgacattggcaataccattaatgtcggtgataccgtcctcctccttgagagtcggcgcaggcttactcttgctgccatgagcttctttagcctcttcctggtatgtgacttcagcgttcttgaagagtttggtggtttccaactcgtcatcattttcatctgtaagagtgaacagatcatacagatcactcagctggaaaccttctctttgatgaggatcacgggtgattttattggtcaaaaattgtttgaatatttggcggtggtagattttctcttcgatagtgcccttggtcatcaagcggaaaatggtgacatcacgcttttggcccagacgccatgcgcgctctcgcgcctgcaagtcagtcgatgggttccagtcgggatcgtaaataatgacacggtcagcacctgtcaaattcactccgatcccgccgacacgggtggtgagtaagaatacgtggatattagggtcgttgttgaatgtgtcaaccagattctggcgctccttgatcggagtagttccgtccattcggaggtaattaaatccaccgagcgctccaaggaatttctcaatgatgtctagcatcagacggccctgggtaaaaaccagggtcttgtgaccagtatctctccacacctcaagcaaacccttcaaaaccttcatcttgccagaccgctctgcatcaccgtaatccgcgtcgcgagagcgcaatgtgtggtctgccaagtctggatggttgcttatcttgcgcagtatgtcaatgccaaacagagagtttcttttccctcgtatgatagacttcatgtcatccgagcccaggaacctcttgtatatggttcgctggagttgggtcaatttgcagaaaatgacctgttcgcttttcatcggcagatcagatgtcacatcagccttgaaccgctggagcagataaggactgatggcatctttgagagtttctgcacatttcgcagcagtctgcacttgaaggtttgatgcagatgcgtagccaccctgacggatggggatctcgaactggtttttgaatgtaacaaggtttcctaggcgcattggaaacacaaagtcaaatagggaccaaagatctaccagactattctgcatcggggtccccgaaagaatgatgcgatgtggagtccggagttccttgcagctgaaggtgataccggcatctggattgcggattttatgaccttcgtcaaggatggcgcagccccattcaacgtcaacaagagcatctgcataagactgcagacctgagtatgtagtcacgaggacatggccctcctccgtgacacgcttaatgatctttttagccgctttctgaccggcagataggtgccgagagctgcggctgctcatcatttctgatgaaagcgcattctcccgactgctttccttaccaagatttatcatcccgctgcccgatgagtgtaggatggagacacggaagggtggccaccagcggtgaaactcattaacccattgtttcataagagttgcagggcaaacaacgatggcaggtttggtgagtttattgctatgatgcagtgccgcaagataagaaatcgcctggatggtttttcccaaccccatttcgtctccgataattccaccaacagtctgttggtgcaactcccaaagccactggactccagttttctgatagggaaagaggaagcggctgatgtctccagggacacgcagtccattgtcaagttccatggccggttcggtgggatgtggcttaagccactcctcttcttcattcaggtcagcgtcgacatgatggctgtcagcgtgccgccgggcagagcttcgccgactgatccattcctggacgcgagactggtatatcgcctcgtttccatcatcaaccccactcaaatcttccagctcaatggtcgcttttccttgcttgcgcttgcgacttggcttggtctcaggaagagtatcaggcatgaactcttcaccctcggatgtagcgtcaccatcagaggcaacgtaacttgccgacgaatctgctcccggggagctacgacgatccaccttcttccgcttgctcttgcttttgctgctcgcgtcaaagtctaagtctgggagtgcaaggtcccggtgggacacggctgggtgatgtttggcttgttcgcgctcctcctcctcctcatgctgttggtcctcggcatcgacaagtgcatcgtgaagattaccaagtggcccatctctggagccctcctgcatcaatgcgaagggagtgatctttccagtcctcaggagatactcgcggcgggactcattcggctgtcgcccagacccgtgcgccaccgtcgagttgccctgcgactcacgcctctcgtcaatgcgctgttggatgtccttcaagtcttttcctagatcggccttgcgcatctgcagccttttcagctcattctcaactcgatggcgagtagcggctccgacgggctgtgtcaggcgttgctgggcttggcggacctgcgaatcgacccgtctgcagattaagttagtcacgctatcaaatatcaagtcatgcgctcttactcccgatccacgagggttttctcaagtcgcttgatgtcattctcctccgctttatctgccagagctttatcggcctgaaaaaaggaaagggtgagccagagtgatagtcaattgagacctgcctgggtcatacctggcgagtgatatctctttcgaggtcatcctggtcgcggacgtctgcttggagatcacgcagacgactcgcctcctcgttcgtggacattgtgaaagttgtccaaataaagattgcattaagtgaaaagaagtgagagactaaaagactttgtctagagtaagggataacatggtgattgctcaaagagcaaacacaatagtacaatagcacaggtagcaaaaagtctagatgaataacacaatctagatccatcagagcaatggcacaatcagccaccgcctatgataagcaccgctcacgtgagtgaatgactcattgaaagcttaggtaattctcatttcaggccccggggtctggaccggtagttaccacttctgttctcacctcgatttcacgtcttggtcagtccaacaacttcgttctttttacccgtggatctctcaaaccttgaaatgtacaaatatgttcacggacatcacagtgtgagaaacctcggatgaaaaagtccttgatggcatacagaattcgaggtgatgaaagcctagagcgagcacatcatcaggcctaacacgttgggataacacatatcgatccatatcatgcacgagcactagcctcacaaaattgttcgtatctggtgatctgaaagcaagaagacggttgctctcctcaaagtacgagagtagggcatcaagccaagaaaagagattcgatcttaggagtgtactacatatttgccagataatccgcaatggctgaaaatcaccatgcctaagagtacttttcttgattaattatctctatattcagaataccataccattattccaataagatgatcaatcccaagttgtgggctcccggcttaactaggaagtgacgtcccatgcctctccaattatatgataccatcaagaagataccccgttattaggtcattcaatattagtagttagttagtaaatccgttcagcctgatgagattacagccacttaataactcgaaagagacgctctgacagttgggcatgcaaatggagcgtcgatcatgtgaaaccagtaatcgccagggagaccacaatccagtactccgttcaaatgtcgagactttagcatcatggtcttgaatatatatgtgcatattgtataccaaaagatagaataccccttcaatatgccctcgtacagaggaaagaaatgacatactatatagactcagatctagcgggcaaagttcacctccacttcgttggaactcatctttccccctcttcttgatctctggctatatactagtaatatctctatgcttcgataaaagccattgtttaacatagtttttgttgatgctagctgtgtctttacagagatttccccttttcacgggggcccaagacaagtccattgacttggctaacccccccagccgcctacgtctactgcgtcgcaaccaaattgcgaccgccccccctctctccctttcaaaacttgtcttcaccaacaatttctcggatgatgaagcatagcacgacctcattttaacgccaattccctacttttcattctctattcgtcgaattccgtcaagactcgcctcgaacgtgcgatcgcattacgagtgccgactccgctggcatcccacggaccctgatcgcagtgcttgagaacacggaccccgaatccatttgttggcccaaaaagagggcttgcacaaaatggatcctgggtggcagccttatcaagatcctttgatgggccaccctgcgcagttcaatactgcgttggcatctcatccccagcaattagcctcgaaatacggtcagccaccacagtcacagccgcccgtcggatacacgtacgaaacattccagacccccgtcacgacatctaaagccccctcggctggctcaaattccaaaactgtctccatggcgtcctcccccactgccacgccacgtactcgggattatgtcaccgacgcggatactaccatggaggacgctgacccgtacaaccgggcaaagtacccctcgaggccaaaccacaatcgcgcctcgtcacaattcttgaatcaagcagaagaatcatcggctgcccgcagatactctccggggaatgttctttcgccgccgatgtcatatcccactagtcctggcaagtcccaaggctcctatggatttccatccgcgcctcagaatgcttcccgtcggtcccccgcgagaccagaatatgcatcaccaccacaaggatatcaatcgccgccatgtgagttcgatctcggtctcttgttcggccatgtcccgtttgctaatatctcgacagccaaccggcccccaagactccctccccttcaatccggcgacctcagcccagaccagtactacccaccatccgcatcttcccacatgagtccaggttttggtccaggggcgcgatctccgcgatctggctcgctgccatctcaggctcctctagtgcccggtcgcggtccagttcccaagttccaaaagattcagtctgtccaagaactgaagccgcgcatgaatatacagcccgcctatcggcgcgccaatccagagggtggatttatcagtgtgagtgctccgcaaacctcactttcttgtcgcgttggctaacccgtccagccacttcaatcgttgacaacccacctcccggccacttaccgcatatgtaaccctggctttaactatgagtcttcgagaaacccgcgacgggtattgaccaaacccagcaaaggggtcaagaatgatgggtatgacaacgaggatagtgattatatcctttatgtcaacgatatccttggaagcgaggaagccggtcacaagtatgcccccgatttcccgataatagccgaaccctgggctgacagttgtttctccttctgatttagaaatcgatacctcattctcgacgttctaggtcaaggtaccttcggccaagtcgtgaaatgccaaaacttgaaatcgggagaagtagtggctgtcaaagtcatcaagaacaagactgcctacttcaaccagagtatgatggaagtttctgtgttggatctcgtatgtcatattcccccaacccctatcgttcggatctccgctgattacccgcagctcaacagcaaatatgacaagaacgacgaccaccacctgcttcgtctcaaggatacattcatccaccgtcagcatttgtgtctcgcattcgaattattgagtgtgaatctttacgagctgattaaacaaaaccaattccgtggattgagcactacccttgtccgggtgtttgcccagcaactgctgaatgccttgagcttgttgaacaaggcgcatctgattcactgtgatttgaagccggagaatattctcctgaaaaagtcagtatcgcctgtgagctttcagggtcagtttctaactgttcacagcctcgagagcccgatcatcaaggtcattgactttggttctgcatgcgatgaacgccagactgtctacacctacattcaatcgcgattttaccgttccccagaagtactattaggtttgccgtacgtacactggtctcacatgttttgttccttattaatttgttcctagctactcatctgccattgacatgtggtcccttgggtgtatcgtggtggagctcttcctgggtctccccctgttccccggctcttcggaatacaatcaagtttgtcggatcgtcgagatgatgggtatcccaccaacatggatgctggagatgggcaagcagtcgggagagtttttcgaaaagacacaggacgagttcggaagaaagacgtaccgcctcaagagcctggagcagtattcccgagaacacaacacgaaggaacaaccgagcaagaagtatttctcagcctcaacgctggaggaaattatccggagttacccaatgcctcggaagaacatgaagcaagcagaggttgatcgaggtaagtttcccttttccactttcaccctgagactttctaatcatcgcagaactgaataaccggattgcatttatcgactttgtacggggactcctgtcaatcaatcctctcgagcgatggtcaccccaacaagccaagctgcacccgttcatcacccagcagaagttcacggggcctttcatgcccccaatgaacctcaagtattcgacggccactaaaccggcaccgggagttcaacagcaacagcaggccgaagctgctagcaaacaaagagcagctcaggcggcgcatgcgcaaaatgcctatgccgtgcagatgaaccaatttcatactccacctcagccccaaccccagccccagcctcaagccccgcccatgtacaatggcatgtacccacaaggcgcgccgcctcctccataccctacccagcagtcccctggctatggtcatcaaatgggaatgatgccaggcaaccaggtacctcctcaaagtctatacgcacaggcgaccacgcgagcaggccgccaacgagcatctaccatggaccccaacggaggaattcccactaccattcaacgagtcgctagccacctggatcccaacgcgccaattcgattgcagcccagccctgcgtattatccacctcctcctgacgggtacgtcgatgctaatgccagtcaacggcgtcgtgggagccgagcgggtaatgcgaatggaaaccaacgcaatcgggattttattcgcacccttgaagatggtgtgcttagcgaaggatacatgggtcagaaccaatggcactagggaattggggcaaaagggcaattcccgtgcccagcgttctctacgactcgggagcaggcatactgatatattttgttcacgggtgtcaatgacctccaaggcactgcatttgtaagccttgctctgctgacccattccttgccagccgattcgttcttatatggctggctcttgtaggtatgagtcaagaaaaataccccttcagtgggttaacgtggtctacaatgatctggaccgctgatacacgatctgcattgctacctagcgctagatcgattcgcacgcttacttgccgtgagctgtgcccatcagtggccaaatcattcgccgcgagatatcactccccgcatcgtcatcactatttcattgcgtttcagtacgtttcgttacgtttcttgccctgttacgattccaattacgtttctccgatttctttaggcagtgcttcggcatgtctgtctgccttttcgtgaattttctctttcagcatagcctggatggagcatgaaagaacgatctcatccatttctttttcttctctcctcgtaactgtttcacttaatttgcaatcttcctagggatgctgatctatcctttttttctttcttttggtcgaggtaagcctctcggtcgcatgtcatggcatgtcgtttctttcgggaggttccttgttttatttactgcatgcagtaaatagtagagttaatagtcagacgataaatgggacaaacgttacgggttgatgagtgtatcattttgcccatattcactagtcaagaaacttctttgcctgcgcctgcctgatcggtcaggccttgattcccggatgagaggcggtttcccaagtacaagcagataaaagtttcctagacttctttttcggatgattcgtactcttttgaaagtcagcggatagtcgaatagtcaaaacaagcaagcagaagcaagtcgaaggaatagaagaagtataaaaaaggccgtcactatttctttgttatgcgctatacctaatctagtttagtcagcccctcgcttaaatttcgtgtgtggctctcaactgcgggaacttcgactttgtatcgccgacgacctgattttctagctttaggatcgccacttccttttaacgaaaccgcaatccgcaaacatggcgtcgcgtttcttctacggcagcggcagcgacagcgacagctcgtctgatgaggaggaggaggtctaccgttccggctccggcagcgaggaagattctgaccaggatgactccgactccggctccagcagcgacagcgacgaagagggcgaggagggccgcaccggtgcctccaagttcttgcacgatgactccgaaagcgaggagagcgaggaggaggagaaggttacaatcgttaagtccgctaaggacaagcgtctcgagggccttgagagcaccatccgcctgattgataacgccgagaagatcaacgactgggctgttatcgccactggtgagtctatacgctgcctgggaggagtgaagagccagccaaattggacgaccccaagaaattgcatgaactgacatgattcccaaacagagttcgacaacctgaaccgccagatgttgaaggttaccggtcccacccccaaggtctacatccaagccgttgccgaactcgaagacttcaccaacgagaccgcttccaagcagaaggcctcgaataagaagatgaacgctagcaacagcaagggcttcaacgcggtcaagcagaagattaagaagaacaacaaggaatacgccaccctcgtcgagaagtaccgcgctggtaaggaagccttcatggcagatgaggtcgaggagaagcccgcccctgctcctgcccccaagcccaccaaggtcgagaggatcgagaacttcgctgccgccgtcgctgcaggtggtgaggatgatggattcgctactgtcggacgtggtggaaagaccctccagtacacccctgagagcatcctcaagcacctccgtgtcattgttgagtcccgcggaaagaagaacaccgaccgtgccgaccagatccgcaccatgcagaagctcctcgaggttgccactactccttaccagcgcatccgcacctacatgaccctgatctccacccgcttcgatcttactgccacatccaccgccacctacatgtcaagtgagcaatggcaggccgcaaacgaggaatactccgctctcctttccgtgttggaagaaaatcgccaattccttgtcagcgaagccgccgatgagtgggaggacgacgagaagcaacctactgttgccgagggtgaaaccttcttcattcccggttccgttgtatcacttgtggagcacctcgacgacagcctcacaaagggtctccgcgagattgaccctcacacctcagagtacattgagcgtctgacggacgagcaggcactttactcctcgcttgttcgctcgcagctttacgttgaaagcctcaagggtgccgataagaatggccaggacagcatgaacagactggttatcagacggttggagcacatttacttcaagcctgctaatgtcattgcgattgtcgagcaagcgaaggacaaggcagttcccacaaatattgagtcagcagttactgctacctataaatctggggatgtccagagcctcgtggcctctatctgcaactacatgttcgaacacagtgatggcattccccgcgctcgcgccatgctctgccaaatttacttccttgctctacacgaccactactacaagtctcgtgacttgatgctcatgtctcacctgactgaaaacatcgccactttcgatgtcagcacccagatccttttcaaccgcacccttgttcagattggtctctgtgccttccgtgctggactcatctacgaggcccagaacacccttggtgagatctgtggtagcggccgccaaaaggaacttctcgcccagggtatcatcatgcagcgttactccactgtctcgcccgagcaggaacgtctggaacgccagcgccagctgcccttccacatgcacatcaacctcgagttgctcgagtgcgtttacctcaccagcagtgctttgcttgaggtgcccctgatggctcaaacctcatctgcccccgagctgcgccgccgcatgatctccaagaccttccgccgtatgttggactacaatgagcgccaggtcttcaccggtccccccgagaacacccgtgacggtgttattgccggagccaaggctcttgccgctggcgactggaagctttctgcctctacattcgccgcgatcaagatttgggacctcatgccccagcccgagttgatcaaggccatgctgtcccgccagacccaagaggagggtctgcgcacctacctcttcacctacgccccctactacgacagcctctccatctcttctctggccaccatgttcgaacttgagcccaagaagattatctccattatctcccgcatgatctcgcacgaagagcttgccgctgctctcgaccaggtcaacgacgccatcatcttccgcaagggcgtcgagctctcccgtctccagtcccagattgtcaccctggccgacaagtccaccaaccttctcgagtctaacgagaagaccctcgagcagcgcacccagggtatggccaacgccttccaacgcgaacacggtcccggtgcccgtggcggccgcggtggtcgcggtcgtggtggtggtcgtggcggtgcccggattccccagggcgatcgccgacccggtggacagcagttcggtggtggtgcattgggcgcagcgatcaaggcttagattctgatgtaatggcatgttctttctcttttttcccccctttcttcatgttttccttttttactcctgtcatccccttcgtgttggtacgaccgttcctttttttttaggccggaaaaattgccccgtttctgcgctttttttgtgattgatctacatgatattcacgtatggaaatgatcgagaaagaatcaaggtgcatactggttagaaattgacggcttatggattagttcttagttttggtgtgtgcggtgtttgtagagttatatatgtactgtaggaagtattcgagcctcctcatagatcgtaccttcgaacgtacaagtgggcttctcagagatgaaacctggcggcttctttgtcactggttctttcacaccactaacatctcaaatgctttgaattggaacaaaattccggatttgtcactcttcgcccgttgtttgtaagtctctctagcgtgtttgaacgaccatactttcctcgagccatttcacaagctgtcgacaatatccttccttgaggtaccattttctcggatgctgatcaaggcgccatttcacaatggagttggcgagcgagaagctcgaaagggccacgctacatcagactggaactataccactggtcatctattacgctttgcttctttgccctgctgtgctttgacaaaaatgcccggtccttttgacatcttctttgattcgagccttcaatcttggacgtataaggtacatcaagatgacacaaagaaccttgaagcaacaccaggggctgaattgcggagtgaacacatttcaacctcaagtcacttcgattgatgagctacaatcccgaggtcccagggttactctgtcgaattcattgttgtcgagcacatgagcttcttgaaagatccaaaaatagcaccttcccctcgatcagtttgtctctatccacacaagattaccttcctctaatccctcattccaatttgtcgttttctttgtcttgtaaaattccacaggatggttactacaaatatcttctctatatcccacatctcaatgcttcttcttcatcccaagttgccaggccctctcctgcagtgctgcaaagtccatctcctttttcttcaagatgccccctcgtcgtagtacgaagcgggcgtactcaaagccccccttggaccctgaggaatctccgaagaaacgcaaatcgaccaacggtaaaagggagatttcttccccttcctctgatttttcatcagacgaaattgaaagtcaattgcccctcttgccagaggactacgactaccttgactacagcatgatgtctcaaagtgtccaggatgaagcgtattcacgccctccgagacaacagcgatggaaacacaatggggccaaacctattaccgatccagcgcttgtcccggaaggttggaatgcggacgaactagatcttgatgtcaatgatatcgatagtcaagttgagagatgtatggagaggatcagtgagggaatcttgccgggtttcttcaagttcagactctcacaatatgagaaaagaagggctgctcgcgatgaaatggtccattctgagccagccggactcagcttggatatcgttcgacgcctgggccatttgaaggctatcgagacacatctcaccacgaatgaggacccggataatcagcttcccaatgtcaaggctctcatcaaagcttacagggaaggaaaattgggctggtcgagaggatgggtgagctactggtggaagggcatgcagctcaatgcgccccataagtttgacgtcgatgttcataagaacatggctgagcagtacgacaacactaaggcgtggtgggtggaaggtgtaagttgatcatcactacatacatacgaacattattcttgattctgacttgagatgtcaaatacagcttcaacctccaggcggtggcagtctaggaggttttcactcgtttgcaccgtatactaatgtccacacaattcaggtatagtgtctatttggtctctcagcttattatttcttctttctaactttcatctcttgcctttcatatagttcccggtgcatatatcggctgatagtcaacttcctggtgctagtggcctcaccctatacgtgtgccatgatactggtgccgatattatggcgatacctcaatgctatatagaccagctggagtcgctaggtatccccgttccagttcacggctataatattatggaaacacctggctcttcatcatgtcacaaggttgtggaggttgacgtccgtctgaccgacaacaacggccaacctttgacccattggatgaaaatacaggcctgtgtcatccaatctaggcccggggagcactttggaatgcttctttcggggccttttgtgcggttcgcgctctacactgctacatgcccagatgggcagggacttctctatgtttgtaatcacaagaaggagctaaggcagctgccagccatgccgggcgactttgtgccaaggggaccaccatttgtggctaccacccgtccagctccggatggtggagaaccaccctactttttactacaagagacgcaacgcatgagaccggcaacaatgcagccgccccaaattccgctaccagcgaagacaccagcgaggagagggagaagaaaggggaagggagggggcccttagtgtcgagtgttctgggatctgtacatggactcggctgtttcattttgacttgctctcttgttgattaggttctgcgtgttcctcactttcttggctttcatatcagacattttgttggattttatactggatttcatctttcattatactttcgttatatatctgctccaattgagacataaaatctcgcactgaactccctcaacacctctctccccttggatattgtggagatccaccaggctttgtagataaccaagccctttgaaaggctttctctcgaagacatcgcggcactcatttcctcaactagcatatcacacagtcttgtagtcagccggccttcgccgccttgggagggtacttcttcccatccttctcaacttgaggtgtacaggaacaccactcgcctttgggaattgagtccatcaccgaagggatatggcttccacagccccaccaggtgaccttgtctgtaataagtaagtactggtctgttgacacagagatgggtggaaactcactgcaggtcgagcaggtagccttcatacacatgatgagattggttttgtatattggttttagaaggaagatcgctgaagtgggaatgtcggaagatttggcttttatattcttttccctccgatattagtcatagccgttaggaccgcgggggaggggagttcgccgatgtctgaagcccgaatccccgatgtgtggtttctggggatttgattggagtttggcaatatgctgattaggagttcgaaatagataagcagaagcaggttattctacgaatgttcgaatgtagcctttataataggagtagaagtactccgtaaatgtttgaaaatctgcagattcttggtggggttatcgcccttccgtggcaacttcaactattttaactaccacacttctcaatcatgacggtcattgctgtggctggtggaactggtggagtgggcaaaactatcgttgagaaattgctggactccaacttcgacatcgtcgttctctctcgcactgtacgcaagcagagacactttccacctgagaaagtaactgacctccttaggtgaaacgggactttgcttcgcagaatattcaaaatgtccagataaactacgatgatattccctcaatggcacgcgtacttgagaaacacaatatccacaccattatatctgccattggtcttgtttctgacgagacaagccagtctcaattgaacttgatcgaagctgcggagaagtcggcaacaacgaaaagattcattcccagtgaatactcattcgtccaaaccaccgagtaggccggccagcttcagctgtatgttattctatgctgatattgaatcttctaagattactcccgattgaccctagcattcaatactggcttgatgcggcagatcgtctcaaagccagcggcttacaatatactaggataatccctggtttttttatggactattggggaatgccacatatccaaactcacctgcaacctttcacctttggtattgatatatctagcggcacagctgcgattccaggagacgggaacaacgtgatctgtatgacatacacgtacgacatggcgagttacttggtcaaggcacttgaccttgatgaatggcctgaattcagtgtaatcgttggagatgaaattacctacaatcagattctcggaatggcggaagaattcaccggtaagcatatcggacgcccttatttgagatacacccgcaacctaataattatatccgaaacaggcaggaaattcaaggtaacttacgatagcctggagcaaatcaaggccggtgatgtcaccgttcctctgcagccagagggaatagaatactcatcggacgaactcaaagaagtgactgcgttggtgagcagactcactgtcaataatgtctttcgactaccggatgatcgtctcaatactcggttcccagaggtgaagccaactacgatgagacaaatcctacacaatgcctggaacagaaatagcacataagttcatcaataccagcaagcttcagaactttgatttcatgaatgatcatttgtaataaaagtgcaaacagaagtcagaactcgaaaattatcctctcattacctccattgaagagtaggatcaaagccttcggtgatattatgcattcgtttctttgaactacaatagcagtaatccagacgtcaacctgattgtctagcagacaggcccgggacgctcgactgcaacacagacctgtcggcctggaatcagattcgagcaccaggggttaatgtcgtcgttccagcacagaagctggctcatggtgaacctattctggttccgcgcgatgatgtcccagcaggtctctccattactgacagtatagaactcggtacctgattttacgtcagtctagcttgagatagagggatttgttttagcttaactcacaatattgtgtcagctgccagccttggacggtattggtgttgacggcggcagatgtgccaagggaagcaattcccagaatgcataggagagatcggacaccgatggcaaccattgtgggctttggagatacgcttggacttattgactatatgtgtctggagactagcaatgggactgaagagtgttggtgattgaataaagaaaacttgaaagggattacttgttacttttatatgtgggatttactgagccgcaaagtactaaaggtcgaatgtcgggagtgatcttttgccttgccggacaagttcatatgacttgagaagtaccgtacctgcaaaataagcgggtaagggcatataatccagctataggttgcatttagattctgttgttgcaaccatagttgcaatgaggcgctgaaacaatgtgaacggcaacatcgcgaaattagccaatgggttcagtgggctggtcttcaccatggcttcgttcttttccattgattgatacatgtctcggcttgaccgatagaagtacgtcctgttttacggttacattgttttcagatatgattcctaaagggagagtaaccttggtccagggaggcctagtcgttatgcagataatagtgtgacaatgacctgagccataaccattcaccgggggtagagcaaaggtagcgcaaacagatacctaagacacagctgaatcgtgcgacaagattcaatagtcatggcggtcagtgagcaatcattctataggcgatgcatttagacttgattatggttcgcggctatttgctatggctagattgggttgttatacagagtaacaccccgttgcatcgccatgggtttgagcaaatagttctttgggatagctggtcctatgacagaattcggggaagaggttcgaaccatggaatttgacgagctcaagatattgctgatgcagatcaaagtacatcgacggaacctatgttagggagtacaaggtgtacaggatcacccaattgaatcaaatgtttatatcatattattgatggtctgatggtggtaaagggttattaccactctggtctgatctaacacagtgatatcatgccttctgctccagttctctagtttacctactgtggcactgattacctggggctgctttttcgaaatctaggaatagcatcagaaattggctgaccagaagagtgaggtctagattcatgactcgaaaaagaggttatttcgctatgcagaccgatgtgggaagtttgaaagtccaagttttccagaaagccaagatggttctaggccacttcttcggtaggccgttgatcctccccgatgaatatttcacagcgagtgcatttaatcagaaattccaatcatgcagttatctgcggcacaggctgtgactccgatgactaccgaggggaagtgttgaaaccgatttactagttgtacatcgtattggcctgaggcatatataatgactcagcatcagtgcctaaatgcctaaacgcttgaatcccaggagtcagtgggaacctcagctacaattctttatcctgatgattgcagccgattaggggttgcaagtctgaagcttttctttggtgatactatacaatcgttttgtatcatggatggaaacaccagcaacgttgtacgccttgccaaggtatcgactagcccccagatggcccttatggcccccatatattgagggaacgactgtgattggatgctgacctgcatacacaaacaaggcatgcagtatatgcagacggaagaaggtcaaatgtgatggaactcggccggtctgtgtcccctgcagaacattcgacttaccttgtaagtacgaggacaccgtgcgacggaagaaaaaactcaaccggtatgttctgcttggcttgttgattctaaattaaccatattgacttactcacggtgaggaacattttcatgagctggaacagcgcattcaatctttacaaggcgaattaaatcaaacacatgcgtccaagagacagcgactgctgagtgatgaggagacaggcccagagcatatccaaccgtcagaagcgtctgattcagagttaccatctccgagaaatgacaacgccccagcatcattcgaggccgaggccgatcgagacgatggcgatggagggtcatatacccttaaaactccgcaaggctcaatgcgattttttggtgagtattggctcgtcaactatccttcctcaacggtcgcacgaatggctgggctgattctaccgactatgcctaggtgcatcctctcatttttcaattgttgcccctgagggtgtgggctggcttgagagcaagacgggtaacaatgtatggcgccatgtcgctcagagaaacagcactcgatggagactagccgactggtatcctcgaactcttcaagatgatttgcaaagcagatgctcgcaacccttaccgtccaaggcggtcatcctagaccttattcgtgaatattttgacacgttcaacaaggccctacctcgaccctaatgtcccttctcatattaagcatggtgagtattatccagaaatctcccttaattcaaacgttcatcatcatgaaaccatatctgacctatgatatttgtagaattttggatgatcaatgccctaccagctggtcctcgcagtctaaaacacagcacgtctctttgtacgatgccagacgattttgaggctggatacggtggtgcacaagcggaagcagtcacgttaacagccgatcacactccgggtaaacctagctggattacattttgtgctggggtgtggtctgtgttgcaatttcagacgaaagtctggtatcaacctgcacagaaagcagcagttgtgaaaaacggtgaattcctttataatatgatacacaacacaccagagcgactcctcgcgcatgagttcacccacgggcatacccaatttggtgcttatcgtgcaagtaagtacttgaccatgcgacttccaacatatcggtctgctaatgaatggttctataaactgttttagtggataaagcgtatggctggggacctattgttgcgcttgctaaaaaagacaacgctcaaactgatgctacccagtcactggctgtcataaatgctggtacagtttcttttctgaaatattgacttgtgaatcttgctaattatctctagatactttcacatattggatcaatggtaagttgcagagatccttatggctccccaagacgacaggcgctagattgaactaaccaccgacggctaggtgtatacttggagatgtgcaacttccgtagcgggaggtgtgaagaccctgatgaagcagcaaaaacgccctaaaactcggactcttcctgactcactgtgtgcaagcaagtcttcctcgggcctcttcgcatgtgagtatctctgcttatttggtatccccggggcccagttttgatcttagagcatattcatctctgtgcctattcattctaacaagcaagcgaagtgttccagttgttccaaggttggaaacgttacatgtgactgttgtcccattcacgtatcttgatagtaaacttggaaccttttttcttggtatataatggagaaaatccgtaaagagaaagacatgcaacttctattaccttatattgattgaatcgaatgcagtgttaagactgtaatgatagagctaaattattcgcagaattattgagataaatgcaagctgacattttcctaatatcggtaacatccaaaaggacatccccaggtcggcttctttttccttttgcagtcacagtctaatctagtaaatgagccgctgtccttccctatcatcttgtcgaaccaatcctccatttctagcttccattagtaactacagagagtaaatagggaggtgccactaaccttcgtcttccttatactttataatgcgatcggccggacagcgagcaattggccttaaccgggaaatccaatcctttaacgaaatattggctttgcgaatatcaaaatccactttgcccctttgtttatctgtagtgtcgattctttcgaaatcataataattgccgtcacagataatatcttccagagagagtgtttctagagataactcgttccgtaaaatgcccaaaaagctgggcatagaagtgatcttttcttcgttgcgttcccatgccatcacggtttcccgggtgggacagacaaaacctccagctgtttcagatggctcatatgggtgatatgtagacatccactttctgctccaatattcttctgtcgacgcctcagaggaatcggaagtcgaggaaagctggggtgattggggtgcactttcggccgatgctgtttctgatgctggtaggactgataggggggctggtccatattctggcggggacacagtcggtgtgtacggtgacgatgttgaaaatgatggcggtgttggttgaaatgacgggactgtaggtccatatgatggcaaggttggttgataagatggcactgtgggtccatatgatggcaaggttggttggtatggtagcactgtaggttgatatgatggcgatgtatatcggacagatctttcattttcctggcggtcaggggactcagcatcttgcgatcgagggttttctgtggctcccgactcctcgctgcctattgtaacccgtctgactgtaagagtgaccagacttttcttaacactgagcaatagtgatctcaaagagctgaaattgatatcaagcttgtttatatgaagctttcggagtcgagtgaagccaatgtcatggaacatgtttccaacgtagccttttgccggataggcattcatgtcatcttgaataagataaaaaggcatatgatcttgcgacaaggtcagtacttccagttgaggtccaagcttcctgaaaagtttcagccaagctgcctcattgagatcaatgcataaatgaagatcctcgaggtcttctaaagtagacagcagagaatctaattgctcttcggagagggcaatcctagggccgatatcataacagaatttagaatcgcaggtagacagctttcggggtctgcagcttgagccacataacgcaagaaaaagctttgataatgccaaggagtttagtttccgtatctgactagccttattggtacgcatagactcttgcaggctataaacatcgaatcgaaaatcgatctggctcatcatctgtcgcctgccgaggaacggaactgtctgctgccggggatcaagcaaaaattccgttctataatgtgcaagtccgattgtttggatgttcttgaatcgatccatacattcccgaagtcgatcactgaatgcttctgattccagcaggttgcgattatccgcaatcatatcttttt

(The sequence listing continues in the following parts.)
